(19) United States
(12) Patent Application Publication
(10) Pub. No.: US 2016/0319253 A1
(43) Pub. Date: Nov. 3, 2016

(54) NOVEL FUSION GENES AS FACTORS RESPONSIBLE FOR GASTRIC CANCER

(71) Applicants: NATIONAL CANCER CENTER, Tokyo (JP); LSIP, LLC, Tokyo (JP)

(72) Inventors: Tatsuhiro SHIBATA, Tokyo (JP); Fumie HOSODA, Tokyo (JP)

(21) Appl. No.: 15/105,141

(22) PCT Filed: Dec. 18, 2014
(86) PCT No.: PCT/JP2014/083526

§ 371 Date: Jun. 16, 2016

(30) Foreign Application Priority Data
Dec. 19, 2013 (JP) 2013-263032

(51) Int. Cl. C12N 9/12; C07K 14/475; C12N 9/00; C07K 14/705; C12Q 1/68; C12N 15/113

(52) U.S. Cl. CPC C12N 9/12; C12Q 1/6886; C12N 15/113; C12N 15/1137; C12N 9/93; C12Y 603/02; C12Y 207/10001; C12Y 207/11001; C07K 14/705; C07K 14/4756; C12Q 2600/156; C12Q 2600/136; C12N 2310/14; C07K 2319/00

(57) ABSTRACT

To identify mutations that can serve as indicators for predicting the effectiveness of drug treatments in cancers such as gastric cancer; to provide a means for detecting said mutations; and to provide a means for identifying, based on said mutations, patients with cancer or subjects with a risk of cancer, in whom drugs targeting genes having said mutations or proteins encoded by said genes show a therapeutic effect.

A method for detecting a gene fusion serving as a responsible mutation (driver mutation) for cancer, the method comprising the step of detecting any one of an ATG3-EPHB1 fusion polynucleotide, a TNIK-RNF123 fusion polynucleotide, or an SLC12A2-NRG2 fusion polynucleotide, or a polypeptide encoded thereby, in an isolated sample from a subject.

### TECHNICAL FIELD

[0001] The present invention relates mainly to a method for detecting gene fusions serving as responsible mutations for cancer, and a method for identifying patients with cancer or subjects with a risk of cancer, in whom substances suppressing the expression and/or activity of polypeptides encoded by fusion polynucleotides produced by said gene fusions show a therapeutic effect.

### BACKGROUND ART

[0002] Cancer is the first-ranked disease among causes of death in Japan. Cancer cells are known to become malignant due to genetic alterations. Identifying genetic alterations characteristic of cancer type is expected to contribute not only to the clarification of carcinogenic mechanisms but also to, for example, the diagnosis and prognosis prediction of cancers and the development and selection of a cancer therapy.

[0003] There have hitherto been reported many cancer-related genes.

[0004] For example, EPHB1 is a gene encoding a receptor tyrosine kinase involved in the development of the nervous system and other tissues. It was reported that loss or reduction of the expression of this protein is associated with invasion and metastasis in gastric cancers (Non Patent Literature 1), invasion in colorectal cancers (Non Patent Literature 2), and the like.

[0005] Also, it was reported that the TNIK (Traf2- and Nck-interacting kinase) gene is essential for colorectal cancer growth (Non Patent Literature 3) and may have an impact on breast cancer cell growth (Non Patent Literature 4).

[0006] The SLC12A2 gene, also called NKCC1 (Na—K—Cl cotransporter 1), was suggested to modulate the migration of glioma cells (Non Patent Literature 5).

[0007] NRG2 is a gene encoding a protein in the neuregulin family which controls cell growth and differentiation through interaction with ERBB family receptors. It was shown that high expression of this gene is related to the aggressiveness of tumors (Non Patent Literature 6).

[0008] In recent years, molecular targeted drugs against cancers have been developed, and there have been increasing examples of successful development of molecular targeted therapies against constituents (e.g., kinases) of carcinogenesis-related signaling pathways. For example, it is reported that tyrosine kinase inhibitors (e.g., crizotinib) targeting ALK protein are effective in the treatment of lung cancer patients bearing the EML4-ALK fusion gene, and that tyrosine kinase inhibitors (e.g., imatinib) targeting the protein encoded by the BCR-ABL fusion gene are effective in the treatment of leukemia patients bearing this fusion gene.

[0009] According to a certain international comparison of morbidity rate, gastric cancer is known to be highly prevalent in East Asian countries including Japan as well as in South America. A comparison of cancer deaths in Japan by body part shows that gastric cancer is the second most frequent cause of cancer deaths in both men and women. In molecular therapies against gastric cancer, there are several known gene targets including HER2.

### CITATION LIST

### Non Patent Literatures

[0010] [Non Patent Literature 1] Wang J. D., et al., Oncology, 2007, 73 (3-4), 238-45.
[0011] [Non Patent Literature 2] Sheng Z., et al., Pathobiology, 2008, 75 (5), 274-80.
[0012] [Non Patent Literature 3] shitashige M., et al., Cancer Res, 2010, 70 (12), 5024-33.
[0013] [Non Patent Literature 4] Jiao X., et al., BMC Genomics, 2013, 14, 165.
[0014] [Non Patent Literature 5] Garzon-Muvdi T., et al., PLoS Biol, 2012, 10 (5), e1001320.
[0015] [Non Patent Literature 6] Revillion F., et al., Ann Oncol, 2008, 19 (1), 73-80.

### SUMMARY OF INVENTION

### Technical Problem

[0016] Identification of mutations in various cancers including gastric cancer has not yet been made thoroughly, and there is still a demand for further identification of mutations that can serve as therapeutic targets and as indicators for predicting the effectiveness of drug treatments.

[0017] Accordingly, the objects of the present invention include but are not limited to the following: to identify mutations that can serve as an indicator for predicting the effectiveness of drug treatments in various cancers including gastric cancer; to provide a means for detecting said mutations; and to provide a means for identifying, based on said mutations, patients with cancers or subjects with a risk of cancers, in whom drugs targeting genes having said mutations or proteins encoded by said genes show a therapeutic effect.

### Solution to Problem

[0018] As the result of conducting intensive studies with a view to achieving the above-mentioned objects, the present inventors identified kinase fusion genes (ATG3-EPHB1 and TNIK-RNF123) and a kinase-related molecule fusion gene (SLC12A2-NRG2) as novel genomic aberrations in gastric cancer. None of these fusion genes is expressed in normal gastric mucosal tissues, and besides, none of the known causative gene mutations for gastric cancer (i.e., KRAS, NRAS and BRAF mutations) was detected in case patients in whom any of the above-mentioned fusion genes was detected; thus, these fusion genes were considered as responsible mutations (driver mutations) for cancer.

[0019] The ATG3-EPHB1 and TNIK-RNF123 fusion genes were considered to lead to constitutive activation of EPHB1 and TNIK kinases, respectively, thereby contributing to malignant transformation of cancers. Therefore, it is considered that EPHB1 and TNIK kinase inhibitors, respectively, would produce a therapeutic effect on cancers positive for the above-mentioned gene fusions.

[0020] As regards the SLC12A2-NRG2 fusion gene, since the cell growth factor NRG2 is a ligand for HER2 which has already been known as a therapeutic target for gastric cancer, it was believed that this fusion gene contributes to the development of gastric cancer through a similar molecular mechanism to that of HER2 mutation. Therefore, an antibody drug against NRG2, or antibody drugs or kinase inhibitors against a group of HER proteins serving as NRG2 receptors could produce a therapeutic effect on cancer positive for this gene fusion.

[0021] The present inventors have made further studies based on these findings and completed the present invention.

[0022] More specifically, the present invention is defined as follows.

[1] A method for detecting a gene fusion serving as a responsible mutation (driver mutation) for cancer, the method comprising the step of detecting a fusion polynucleotide of any one of (a) to (c) below, or a polypeptide encoded thereby, in an isolated sample from a subject:
(a) an ATG3-EPHB1 fusion polynucleotide which encodes a polypeptide comprising the kinase domain of EPHB1 and having kinase activity;
(b) a TNIK-RNF123 fusion polynucleotide which encodes a polypeptide comprising the kinase domain of TNIK and the SPRY domain and RING finger domain of RNF123, and having kinase activity; and
(c) an SLC12A2-NRG2 fusion polynucleotide which encodes a polypeptide comprising the AA_permease_N super family domain of SLC12A2 and the neuregulin family conserved region of NRG2, and having intracellular signaling-enhancing activity.
[2] The method according to [1], wherein the fusion polynucleotide is any one of (a) to (c) below:
(a) an ATG3-EPHB1 fusion polynucleotide encoding the polypeptide mentioned below:

[0023] (i) a polypeptide consisting of the amino acid sequence of SEQ ID NO: 2,

[0024] (ii) a polypeptide consisting of an amino acid sequence derived from the amino acid sequence of SEQ ID NO: 2 by deletion, substitution or addition of one or more amino acids, and the polypeptide having kinase activity, or

[0025] (iii) a polypeptide consisting of an amino acid sequence having a sequence identity of at least 80% to the amino acid sequence of SEQ ID NO: 2, and the polypeptide having kinase activity;

(b) a TNIK-RNF123 fusion polynucleotide encoding the polypeptide mentioned below:

[0026] (i) a polypeptide consisting of the amino acid sequence of SEQ ID NO: 4, 6, 8, 10, 12, 14, 16 or 18,

[0027] (ii) a polypeptide consisting of an amino acid sequence derived from the amino acid sequence of SEQ ID NO: 4, 6, 8, 10, 12, 14, 16 or 18 by deletion, substitution or addition of one or more amino acids, and the polypeptide having kinase activity, or

[0028] (iii) a polypeptide consisting of an amino acid sequence having a sequence identity of at least 80% to the amino acid sequence of SEQ ID NO: 4, 6, 8, 10, 12, 14, 16 or 18, and the polypeptide having kinase activity; and

(c) an SLC12A2-NRG2 fusion polynucleotide encoding the polypeptide mentioned below:

[0029] (i) a polypeptide consisting of the amino acid sequence of SEQ ID NO: 20, 22, 24, 26 or 28,

[0030] (ii) a polypeptide consisting of an amino acid sequence derived from the amino acid sequence of SEQ ID NO: 20, 22, 24, 26 or 28 by deletion, substitution or addition of one or more amino acids, and the polypeptide having intracellular signaling-enhancing activity, or

[0031] (iii) a polypeptide consisting of an amino acid sequence having a sequence identity of at least 80% to the amino acid sequence of SEQ ID NO: 20, 22, 24, 26 or 28, and the polypeptide having intracellular signaling-enhancing activity.

[3] The method according to [1] or [2], wherein the fusion polynucleotide is any one of (a) to (c) below:
(a) (i) a polynucleotide consisting of the nucleotide sequence of SEQ ID NO: 1,

[0032] (ii) a polynucleotide that hybridizes under stringent conditions with a polynucleotide consisting of a nucleotide sequence complementary to the polynucleotide consisting of the nucleotide sequence of SEQ ID NO: 1, and which encodes a polypeptide having kinase activity,

[0033] (iii) a polynucleotide that consists of a nucleotide sequence derived from the nucleotide sequence of SEQ ID NO: 1 by deletion, substitution or addition of one or more nucleotides, and which encodes a polypeptide having kinase activity, or

[0034] (iv) a polynucleotide that has a sequence identity of at least 80% to the polynucleotide consisting of the nucleotide sequence of SEQ ID NO: 1, and which encodes a polypeptide having kinase activity;

(b) (i) a polynucleotide consisting of the nucleotide sequence of SEQ ID NO: 3, 5, 7, 9, 11, 13, 15 or 17,

[0035] (ii) a polynucleotide that hybridizes under stringent conditions with a polynucleotide consisting of a nucleotide sequence complementary to the polynucleotide consisting of the nucleotide sequence of SEQ ID NO: 3, 5, 7, 9, 11, 13, 15 or 17, and which encodes a polypeptide having kinase activity,

[0036] (iii) a polynucleotide that consists of a nucleotide sequence derived from the nucleotide sequence of SEQ ID NO: 3, 5, 7, 9, 11, 13, 15 or 17 by deletion, substitution or addition of one or more nucleotides, and which encodes a polypeptide having kinase activity, or

[0037] (iv) a polynucleotide that has a sequence identity of at least 80% to the polynucleotide consisting of the nucleotide sequence of SEQ ID NO: 3, 5, 7, 9, 11, 13, 15 or 17, and which encodes a polypeptide having kinase activity; and

(c) (i) a polynucleotide consisting of the nucleotide sequence of SEQ ID NO: 19, 21, 23, 25 or 27,

[0038] (ii) a polynucleotide that hybridizes under stringent conditions with a polynucleotide consisting of a nucleotide sequence complementary to the polynucleotide consisting of the nucleotide sequence of SEQ ID NO: 19, 21, 23, 25 or 27, and which encodes a polypeptide having intracellular signaling-enhancing activity,

[0039] (iii) a polynucleotide that consists of a nucleotide sequence derived from the nucleotide sequence of SEQ ID NO: 19, 21, 23, 25 or 27 by deletion, substitution or addition of one or more nucleotides, and which encodes a polypeptide having intracellular signaling-enhancing activity, or

[0040] (iv) a polynucleotide that has a sequence identity of at least 80% to the polynucleotide consisting of the nucleotide sequence of SEQ ID NO: 19, 21, 23, 25 or 27, and which encodes a polypeptide having intracellular signaling-enhancing activity.

[4] The method according to any one of [1] to [3], wherein the cancer is gastric cancer.
[5] A method for identifying a patient with cancer or a subject with a risk of cancer, in whom a substance suppressing the expression and/or activity of a polypeptide encoded by a fusion polynucleotide produced by a gene fusion serving as a responsible mutation (driver mutation) for cancer shows a therapeutic effect, the method comprising the steps of:
(1) detecting a fusion polynucleotide of any one of (a) to (c) below, or a polypeptide encoded thereby, in an isolated sample from the subject:

[0041] (a) an ATG3-EPHB1 fusion polynucleotide which encodes a polypeptide comprising the kinase domain of EPHB1 and having kinase activity,

[0042] (b) a TNIK-RNF123 fusion polynucleotide which encodes a polypeptide comprising the kinase domain of TNIK and the SPRY domain and RING finger domain of RNF123, and having kinase activity, and

[0043] (c) an SLC12A2-NRG2 fusion polynucleotide which encodes a polypeptide comprising the AA_permease_N super family domain of SLC12A2 and the neuregulin family conserved region of NRG2, and having intracellular signaling-enhancing activity; and

(2) determining that the substance suppressing the expression and/or activity of the polypeptide shows a therapeutic effect in the subject, in the case where the fusion polynucleotide of any one of (a) to (c) or the polypeptide encoded thereby is detected.
[6] A kit for detecting a gene fusion serving as a responsible mutation (driver mutation) for cancer, the kit comprising any or a combination of (A) to (C) below:
(A) a polynucleotide that serves as a probe designed to specifically recognize an ATG3-EPHB1 fusion polynucleotide, a TNIK-RNF123 fusion polynucleotide, or an SLC12A2-NRG2 fusion polynucleotide;
(B) polynucleotides that serve as a pair of primers designed to enable specific amplification of an ATG3-EPHB1 fusion polynucleotide, a TNIK-RNF123 fusion polynucleotide, or an SLC12A2-NRG2 fusion polynucleotide; and
(C) an antibody that specifically recognizes an ATG3-EPHB1 fusion polypeptide, a TNIK-RNF123 fusion polypeptide, or an SLC12A2-NRG2 fusion polypeptide.
[7] An isolated ATG3-EPHB1 fusion polypeptide or a fragment thereof, which comprises the kinase domain of EPHB1 and has kinase activity.
[8] An isolated TNIK-RNF123 fusion polypeptide or a fragment thereof, which comprises the kinase domain of TNIK and the SPRY domain and RING finger domain of RNF123, and has kinase activity.
[9] An isolated SLC12A2-NRG2 fusion polypeptide or a fragment thereof, which comprises the AA_permease_N super family domain of SLC12A2 and the neuregulin family conserved region of NRG2, and has intracellular signaling-enhancing activity.
[10] A polynucleotide encoding the fusion polypeptide or the fragment thereof according to any one of [7] to [9].
[11] A therapeutic agent for cancer positive for ATG3-EPHB1, TNIK-RNF123 or SLC12A2-NRG2 gene fusion.
[12] The therapeutic agent according to [11], comprising, as an active ingredient, a substance suppressing the expression and/or activity of: an ATG3-EPHB1 fusion polypeptide comprising the kinase domain of EPHB1 and having kinase activity; a TNIK-RNF123 fusion polypeptide comprising the kinase domain of TNIK and the SPRY domain and RING finger domain of RNF123 and having kinase activity; or an SLC12A2-NRG2 fusion polypeptide comprising the AA_permease_N super family domain of SLC12A2 and the neuregulin family conserved region of NRG2, and having intracellular signaling-enhancing activity.
[13] The therapeutic agent according to [11] or [12], wherein the cancer is gastric cancer.
[14] A drug for use in the treatment of cancer, the drug comprising a substance suppressing the expression and/or activity of: an ATG3-EPHB1 fusion polypeptide comprising the kinase domain of EPHB1 and having kinase activity; a TNIK-RNF123 fusion polypeptide comprising the kinase domain of TNIK and the SPRY domain and RING finger domain of RNF123 and having kinase activity; or an SLC12A2-NRG2 fusion polypeptide comprising the AA_permease_N super family domain of SLC12A2 and the neuregulin family conserved region of NRG2, and having intracellular signaling-enhancing activity.
[15] The drug according to [14], wherein the cancer is cancer positive for ATG3-EPHB1, TNIK-RNF123 or SLC12A2-NRG2 gene fusion.
[16] The drug according to [14] or [15], wherein the cancer is gastric cancer.
[17] A method for treatment of cancer, comprising the step of administering to a subject a therapeutically effective amount of a substance suppressing the expression and/or activity of: an ATG3-EPHB1 fusion polypeptide comprising the kinase domain of EPHB1 and having kinase activity; a TNIK-RNF123 fusion polypeptide comprising the kinase domain of TNIK and the SPRY domain and RING finger domain of RNF123 and having kinase activity; or an SLC12A2-NRG2 fusion polypeptide comprising the AA_permease_N super family domain of SLC12A2 and the neuregulin family conserved region of NRG2, and having intracellular signaling-enhancing activity.
[18] The method according to [17], wherein the subject is a patient with cancer positive for ATG3-EPHB1, TNIK-RNF123 or SLC12A2-NRG2 gene fusion.
[19] The method according to [17], wherein the subject is a patient with gastric cancer.
[20] A method for screening a cancer therapeutic agent, the method comprising the steps of:
(1) bringing a test substance into contact with a cell that expresses: an ATG3-EPHB1 fusion polypeptide comprising the kinase domain of EPHB1 and having kinase activity; a TNIK-RNF123 fusion polypeptide comprising the kinase domain of TNIK and the SPRY domain and RING finger domain of RNF123 and having kinase activity; or an SLC12A2-NRG2 fusion polypeptide comprising the AA_permease_N super family domain of SLC12A2 and the neuregulin family conserved region of NRG2, and having intracellular signaling-enhancing activity;
(2) determining whether the expression and/or activity of any of said fusion polypeptides is suppressed or not; and
(3) selecting the substance determined to suppress the expression and/or activity of any of said fusion polypeptides, as a cancer therapeutic agent.

### Advantageous Effects of Invention

[0044] The present invention makes it possible to detect unknown responsible mutations for the particular cancer, which have been first identified according to the present invention; to identify, based on the presence of said responsible mutations, patients with said cancer or subjects with a risk of said cancer, in whom a cancer treatment takes effect; and to treat said patients. In other words, this invention provides stratification biomarkers for use in personalized cancer medicine as well as new targets for molecular targeted therapies against cancers.

### BRIEF DESCRIPTION OF DRAWINGS

[0045] FIG. 1 is a schematic drawing showing examples of the genome structures of ATG3 and EPHB1, and the domain structure of an ATG3-EPHB1 fusion polypeptide (SEQ ID NO: 2).

[0046] FIG. 2 is a schematic drawing showing examples of the genome structures of TNIK and RNF123, and the domain structure of a TNIK-RNF123 fusion polypeptide (SEQ ID NO: 4).

[0047] FIG. 3 is a schematic drawing showing examples of the genome structures of SLC12A2 and NRG2, and the domain structure of an SLC12A2-NRG2 fusion polypeptide (SEQ ID NO: 28).

[0048] FIG. 4 is a schematic drawing showing examples of the genome structures of SLC12A2 and NRG2, and the domain structure of an SLC12A2-NRG2 fusion polypeptide (SEQ ID NO: 20).

### DESCRIPTION OF EMBODIMENTS

[0049] As disclosed below in Examples, the present inventors first found, in cancer tissues, the following three types of gene fusions serving as responsible mutations (driver mutations) for cancer: ATG3-EPHB1 gene fusion, TNIK-RNF123 gene fusion, and SLC12A2-NRG2 gene fusion. On the basis of this finding, the present invention mainly provides a method for detecting said gene fusions; a method for identifying, based on the presence of said responsible mutations, patients with cancer or subjects with a risk of cancer, in whom cancer treatments take effect; a method for treatment of cancer; a cancer therapeutic agent; and a method for screening a cancer therapeutic agent.

[0050] For the purpose of the present invention, the term “responsible mutations for cancer” is a term used interchangeably with the term “driver mutations”, and refers to mutations that are present in cancer tissues and which are capable of inducing carcinogenesis of cells. Typically speaking, if a mutation is found in a cancer tissue in which none of known oncogene mutations exists (in other words, if a mutation exists in a mutually exclusive manner with the known oncogene mutations), then the mutation can be determined to be a responsible mutation for cancer.

[0051] <Specific Responsible Mutations for Cancer>

[0052] Hereunder, the respective gene fusions will be explained. For the purpose of the present specification, the “point of fusion” in a fusion polynucleotide refers to a boundary that connects gene segments each extending toward the 5′- or 3′-end, in other words, a boundary between two nucleotide residues. The “point of fusion” in a fusion polypeptide refers to a boundary that connects polypeptides each extending toward the N- or C-terminus, in other words, a boundary between two amino acid residues, or, if a gene fusion occurs in one codon, one amino acid residue per se encoded by the codon.

[0053] (1) ATG3-EPHB1 Gene Fusion

[0054] This gene fusion is a mutation that expresses a fusion protein between ATG3 protein and EPHB1 protein (hereinafter also referred to as the “ATG3-EPHB1 fusion polypeptide”) and which is caused by an inversion (inv3) having breakpoints in regions 3q13.2 and 3q21-q23 of a human chromosome.

[0055] ATG3 protein is a protein encoded by the gene located on chromosome 3q13.2 in human, and is typified by a protein consisting of the amino acid sequence of SEQ ID NO: 30 (NCBI accession No. NP_071933.2 (29 Sep. 2013)). ATG3 protein is an E2-like conjugation enzyme essential for autophagy (Tanida I., Tanida-Miyake E., Komatsu M., Ueno T., Kominami E., “Human Apg3p/Aut1p homologue is an authentic E2 enzyme for multiple substrates, GATE-16, GABARAP, and MAP-LC3, and facilitates the conjugation of hApg12p to hApg5p.”, J Biol Chem., 19 Apr. 2002; 277 (16): 13739-44).

[0056] EPHB1 protein is a protein encoded by the gene located on chromosome 3q21-q23 in human, and is typified by a protein consisting of the amino acid sequence of SEQ ID NO: 32 (NCBI accession No. NP_004432.1 (25 Aug. 2013)). EPHB1 protein is a transmembrane-ephrin receptor protein belonging to the receptor tyrosine kinase family (Vindis C., Cerretti D. P., Daniel T. O., Huynh-Do U., “EphB1 recruits c-Src and p52Shc to activate MAPK/ERK and promote chemotaxis.”, J Cell Biol., 18 Aug. 2003; 162 (4): 661-71). EPHB1 protein is characterized by having the kinase domain (FIG. 1), which corresponds to, for example, the amino acid sequence at positions 619 to 878 of the amino acid sequence of SEQ ID NO: 32 in humans.

[0057] In EPHB1 protein, a SAM domain (e.g., positions 908 to 975 of the amino acid sequence of SEQ ID NO: 32) is present in a region toward the C-terminus relative to the kinase domain.

[0058] The ATG3-EPHB1 fusion polypeptide is a polypeptide comprising the kinase domain of EPHB1 protein and having kinase activity.

[0059] The ATG3-EPHB1 fusion polypeptide can contain all of the kinase domain of EPHB1 protein, or can contain part of said kinase domain as long as the ATG3-EPHB1 fusion polypeptide has kinase activity.

[0060] The expression saying that the ATG3-EPHB1 fusion polypeptide “has kinase activity” means that said fusion polypeptide is active as an enzyme phosphorylating tyrosine due to the kinase domain derived from EPHB1 protein. The kinase activity of the ATG3-EPHB1 fusion polypeptide is determined by a conventional method, and is commonly determined by incubating the fusion polypeptide with a substrate (e.g., synthetic peptide substrate) and ATP under appropriate conditions and then detecting phosphorylated tyrosine in the substrate. The kinase activity can also be determined using a commercially available measurement kit.

[0061] The ATG3 protein-derived sequence present in the ATG3-EPHB1 fusion polypeptide is not particularly limited.

[0062] In the present invention, the polynucleotide encoding the ATG3-EPHB1 fusion polypeptide (hereinafter also referred to as the “ATG3-EPHB1 fusion polynucleotide”) is a polynucleotide that encodes a polypeptide comprising the kinase domain of EPHB1 protein and having kinase activity. The ATG3-EPHB1 fusion polynucleotide can be in the form of any of mRNA, cDNA and genomic DNA.

[0063] The ATG3-EPHB1 fusion polynucleotide according to the present invention can be, for example, an ATG3-EPHB1 fusion polynucleotide encoding the polypeptide mentioned below:

(i) a polypeptide consisting of the amino acid sequence of SEQ ID NO: 2,
(ii) a polypeptide consisting of an amino acid sequence derived from the amino acid sequence of SEQ ID NO: 2 by deletion, substitution or addition of one or more amino acids, and the polypeptide having kinase activity, or
(iii) a polypeptide consisting of an amino acid sequence having a sequence identity of at least 80% to the amino acid sequence of SEQ ID NO: 2, and the polypeptide having kinase activity.

[0064] As disclosed below in Examples, the amino acid sequence of SEQ ID NO: 2 is an amino acid sequence encoded by the ATG3-EPHB1 fusion polynucleotide which was found in a sample from a human cancer tissue.

[0065] As used above in (ii), the phrase “one or more amino acids” refers to generally 1 to 50 amino acids, preferably 1 to 30 amino acids, more preferably 1 to 10 amino acids, still more preferably one to several amino acids (for example, 1 to 5 amino acids, 1 to 4 amino acids, 1 to 3 amino acids, 1 or 2 amino acids, or one amino acid).

[0066] As used above in (iii), the “sequence identity of at least 80%” refers to a sequence identity of preferably at least 85%, more preferably at least 90% or at least 95%, still more preferably at least 97%, at least 98% or at least 99%. Amino acid sequence identity can be determined using the BLASTX or BLASTP program (Altschul S. F., et al., J. Mol. Biol., 1990, 215: 403) which is based on the BLAST algorithm developed by Karlin and Altschul (Proc. Natl. Acad. Sci. USA, 1990, 87: 2264-2268; and Proc. Natl. Acad. Sci. USA, 1993, 90: 5873). In the process of making amino acid sequence analysis using BLASTX, the parameter setting is typically made as follows: score=50 and wordlength=3. In the process of making amino acid sequence analysis using the BLAST and Gapped BLAST programs, the default parameters of these programs are used. The specific procedures for conducting these analyses are well known to those skilled in the art (e.g., http://www.ncbi.nlm.nih.gov/).

[0067] Also, the ATG3-EPHB1 fusion polynucleotide according to the present invention can be, for example, any one of the polynucleotides mentioned below:

(i) a polynucleotide consisting of the nucleotide sequence of SEQ ID NO: 1,
(ii) a polynucleotide that hybridizes under stringent conditions with a polynucleotide consisting of a nucleotide sequence complementary to the polynucleotide consisting of the nucleotide sequence of SEQ ID NO: 1, and which encodes a polypeptide having kinase activity,
(iii) a polynucleotide that consists of a nucleotide sequence derived from the nucleotide sequence of SEQ ID NO: 1 by deletion, substitution or addition of one or more nucleotides, and which encodes a polypeptide having kinase activity, or
(iv) a polynucleotide that has a sequence identity of at least 80% to the polynucleotide consisting of the nucleotide sequence of SEQ ID NO: 1, and which encodes a polypeptide having kinase activity.

[0068] As disclosed below in Examples, the nucleotide sequence of SEQ ID NO: 1 is a nucleotide sequence of an ATG3-EPHB1 fusion polynucleotide which was found in a sample from a human cancer tissue.

[0069] As used above in (ii), the phrase “under stringent conditions” refers to moderately or highly stringent conditions, unless particularly specified.

[0070] The moderately stringent conditions can be easily designed by those skilled in the art on the basis of, for example, the length of a polynucleotide of interest. Basic conditions are described in Sambrook, et al., Molecular Cloning: A Laboratory Manual, 3rd ed., ch. 6-7, Cold Spring Harbor Laboratory Press, 2001. Typically, the moderately stringent conditions comprise: prewashing of a nitrocellulose filter in 5×SSC, 0.5% SDS, 1.0 mM EDTA (pH 8.0); hybridization in ca. 50% formamide, 2-6×SSC at about 40-50° C. (or any other similar hybridization solution like a Stark's solution in ca. 50% formamide at about 42° C.); and washing of the filter in 0.5-6×SSC, 0.1% SDS at about 40° C.-60° C. The moderately stringent conditions preferably comprise hybridization in 6×SSC at about 50° C., and may comprise the prewashing and/or washing under the above-mentioned conditions.

[0071] The highly stringent conditions can also be easily designed by those skilled in the art on the basis of, for example, the length of a polynucleotide of interest. The highly stringent conditions involve a higher temperature and/or a lower salt concentration than the moderately stringent conditions. Typically, the highly stringent conditions comprise hybridization in 0.2-6×SSC, preferably 6×SSC, more preferably 2×SSC, still more preferably 0.2×SSC, at about 65° C. In any case, the highly stringent conditions preferably comprise washing in 0.2×SSC, 0.1% SDS at about 65-68° C.

[0072] In any case, as a buffer for use in hybridization, prewashing and washing, SSPE (1×SSPE: 0.15 M NaCl, 10 mM NaH₂PO₄, and 1.25 mM EDTA, pH 7.4) can be used in place of SSC (1×SSC: 0.15 M NaCl and 15 mM sodium citrate). In any case, washing can be done for about 15 minutes after the completion of hybridization.

[0073] As used above in (iii), the phrase “one or more nucleotides” refers to generally 1 to 50 nucleotides, preferably 1 to 30 nucleotides, more preferably 1 to 10 nucleotides, still more preferably one to several nucleotides (for example, 1 to 5 nucleotides, 1 to 4 nucleotides, 1 to 3 nucleotides, 1 or 2 nucleotides, or one nucleotide).

[0074] As used above in (iv), the “sequence identity of at least 80%” refers to a sequence identity of preferably at least 85%, more preferably at least 90% or at least 95%, still more preferably at least 97%, at least 98% or at least 99%. Nucleotide sequence identity can be determined using the BLASTN program (Altschul S. F., et al., J. Mol. Biol., 1990, 215: 403) which is based on the above-mentioned BLAST algorithm. In the process of making nucleotide sequence analysis using BLASTN, the parameter setting is typically made as follows: score=100 and wordlength=12.

[0075] (2) TNIK-RNF123 Gene Fusion

[0076] This gene fusion is a mutation that expresses a fusion protein between TNIK protein and RNF123 protein (hereinafter also referred to as the “TNIK-RNF123 fusion polypeptide”) and which is caused by an inversion (inv3) having breakpoints in regions 3q26.31 and 3p24.3 of a human chromosome.

[0077] TNIK protein is a protein encoded by the gene located on chromosome 3q26.31 in human, and is typified by a protein consisting of the amino acid sequence of SEQ ID NO: 34, 36, 38, 40, 42, 44, 46 or 48 (NCBI accession No. NP_055843.1 (17 Apr. 2013), NP_001155032.1 (17 Apr. 2013), NP_001155033.1 (17 Apr. 2013), NP_001155034.1 (17 Apr. 2013), NP_001155035.1 (17 Apr. 2013), NP_001155036.1 (17 Apr. 2013), NP_001155037.1 (17 Apr. 2013), or NP_001155038.1 (17 Apr. 2013)). TNIK protein has the serine/threonine kinase domain at the N-terminus and the CNH (GCK) domain at the C-terminus (FIG. 2), and is known to be involved, for example, in cytoskeleton regulation (Fu C. A., Shen M., Huang B. C., Lasaga J., Payan D. G., Luo Y., “TNIK, a novel member of the germinal center kinase family that activates the c-Jun N-terminal kinase pathway and regulates the cytoskeleton.”, J Biol Chem., 22 Oct. 1999; 274 (43): 30729-37) and in Wnt signaling activation (Mahmoudi T., Li V. S., Ng S. S., Taouatas N., Vries R. G., Mohammed S., Heck A. J., Clevers H., “The kinase TNIK is an essential activator of Wnt target genes.”, EMBO J., 4 Nov. 2009; 28 (21): 3329-40). The kinase domain corresponds to, for example, the amino acid sequence at positions 25 to 289 of the amino acid sequence of SEQ ID NO: 34 in humans. The CNH domain corresponds to, for example, the amino acid sequence at positions 1042 to 1340 of the amino acid sequence of SEQ ID NO: 34 in humans.

[0078] RNF123 protein is a protein encoded by the gene located on chromosome 3p24.3 in human, and is typified by a protein consisting of the amino acid sequence of SEQ ID NO: 50 (NCBI accession No. NP_071347.2 (26 Aug. 2013)). RNF123 protein is an E3 ubiquitin ligase enzyme which ubiquitinates cyclin-dependent kinase inhibitor 1B (CDKN1B=p27, Kip1) (Kamura T., Hara T., Matsumoto M., Ishida N., Okumura F., Hatakeyama S., Yoshida M., Nakayama K., Nakayama K. I., “Cytoplasmic ubiquitin ligase KPC regulates proteolysis of p27(Kip1) at G1 phase.”, Nat Cell Biol., December 2004; 6 (12): 1229-35). RNF123 protein is characterized by having the SPRY domain and the RING finger domain (FIG. 2). The SPRY domain corresponds to, for example, the amino acid sequence at positions 132 to 251 of the amino acid sequence of SEQ ID NO: 50 in humans. The RING finger domain corresponds to, for example, the amino acid sequence at positions 1254 to 1295 of the amino acid sequence of SEQ ID NO: 50 in humans.

[0079] The TNIK-RNF123 fusion polypeptide is a polypeptide comprising the kinase domain of TNIK protein and the SPRY domain and RING finger domain of RNF123 and having kinase activity.

[0080] The TNIK-RNF123 fusion polypeptide can contain all of the kinase domain of TNIK protein, or can contain part of said kinase domain as long as the TNIK-RNF123 fusion polypeptide has kinase activity.

[0081] The expression saying that the TNIK-RNF123 fusion polypeptide “has kinase activity” means that said fusion polypeptide is active as an enzyme phosphorylating serine or threonine due to the kinase domain derived from TNIK protein. The kinase activity of the TNIK-RNF123 fusion polypeptide is determined by a conventional method, and is commonly determined by incubating the fusion polypeptide with a substrate (e.g., synthetic peptide substrate) and ATP under appropriate conditions and then detecting phosphorylated serine or threonine in the substrate. The kinase activity can also be determined using a commercially available measurement kit.

[0082] The TNIK-RNF123 fusion polypeptide can contain all of the SPRY domain and the RING finger domain of RNF123 protein, or can contain part of the SPRY domain and the RING finger domain as long as their original functions in RNF123 protein can be retained. The expression saying that part of the SPRY domain and the RING finger domain retains their original functions in RNF123 protein means that RNF123 protein containing part of the SPRY domain and RING finger domain has E3 activity. The E3 activity can be determined by, for example, a method described in Kamura, T., et al., Nature Cell Biology, 2004, 6 (12), 1229-35.

[0083] In the present invention, the polynucleotide encoding the TNIK-RNF123 fusion polypeptide (hereinafter also referred to as the “TNIK-RNF123 fusion polynucleotide”) is a polynucleotide that encodes the polypeptide comprising the kinase domain of TNIK protein and the SPRY domain and RING finger domain of RNF123, and having kinase activity. The TNIK-RNF123 fusion polynucleotide can be in the form of any of mRNA, cDNA and genomic DNA.

[0084] The TNIK-RNF123 fusion polynucleotide according to the present invention can be, for example, a TNIK-RNF123 fusion polynucleotide encoding the polypeptide mentioned below:

(i) a polypeptide consisting of the amino acid sequence of SEQ ID NO: 4, 6, 8, 10, 12, 14, 16 or 18,
(ii) a polypeptide consisting of an amino acid sequence derived from the amino acid sequence of SEQ ID NO: 4, 6, 8, 10, 12, 14, 16 or 18 by deletion, substitution or addition of one or more amino acids, and the polypeptide having kinase activity, or
(iii) a polypeptide consisting of an amino acid sequence having a sequence identity of at least 80% to the amino acid sequence of SEQ ID NO: 4, 6, 8, 10, 12, 14, 16 or 18, and the polypeptide having kinase activity.

[0085] As disclosed below in Examples, the amino acid sequence of SEQ ID NO: 4, 6, 8, 10, 12, 14, 16 or 18 is an amino acid sequence encoded by the TNIK-RNF123 fusion polynucleotide comprising partial sequences, which was found in a sample from a human cancer tissue.

[0086] The phrases “one or more amino acids” and “sequence identity of at least 80%” as used above in (ii) and (iii), respectively, have the same meanings as described above in “(1) ATG3-EPHB1 gene fusion”.

[0087] Also, the TNIK-RNF123 fusion polynucleotide according to the present invention can be, for example, any one of the polynucleotides mentioned below:

(i) a polynucleotide consisting of the nucleotide sequence of SEQ ID NO: 3, 5, 7, 9, 11, 13, 15 or 17,
(ii) a polynucleotide that hybridizes under stringent conditions with a polynucleotide consisting of a nucleotide sequence complementary to the polynucleotide consisting of the nucleotide sequence of SEQ ID NO: 3, 5, 7, 9, 11, 13, 15 or 17, and which encodes a polypeptide having kinase activity,
(iii) a polynucleotide that consists of a nucleotide sequence derived from the nucleotide sequence of SEQ ID NO: 3, 5, 7, 9, 11, 13, 15 or 17 by deletion, substitution or addition of one or more nucleotides, and which encodes a polypeptide having kinase activity, or
(iv) a polynucleotide that has a sequence identity of at least 80% to the polynucleotide consisting of the nucleotide sequence of SEQ ID NO: 3, 5, 7, 9, 11, 13, 15 or 17, and which encodes a polypeptide having kinase activity.

[0088] As disclosed below in Examples, the nucleotide sequence of SEQ ID NO: 3 is a nucleotide sequence of a TNIK-RNF123 fusion polynucleotide comprising partial sequences, which was found in a sample from a human cancer tissue.

[0089] The phrases “under stringent conditions”, “one or more nucleotides”, and “sequence identity of at least 80%” as used above in (ii), (iii) and (iv), respectively, have the same meanings as described above in “(1) ATG3-EPHB1 gene fusion”.

[0090] (3) SLC12A2-NRG2 Gene Fusion

[0091] This gene fusion is a mutation that expresses a fusion protein between SLC12A2 protein and NRG2 protein (hereinafter also referred to as the “SLC12A2-NRG2 fusion polypeptide”) and which is caused by an inversion (inv5) having breakpoints in regions 5q23.3 and 5q23-q33 of a human chromosome.

[0092] SLC12A2 protein is a protein encoded by the gene located on chromosome 5q23.3 in humans, and is typified by a protein consisting of the amino acid sequence of SEQ ID NO: 52 or 54 (NCBI accession No. NP_001037.1 (22 Sep. 2013) or NP_001243390.1 (28 Sep. 2013)). SLC12A2 protein is a membrane protein functioning as a Na—K—Cl cotransporter (Somasekharan S., Tanis J., Forbush B., “Loop diuretic and ion-binding residues revealed by scanning mutagenesis of transmembrane helix 3 (TM3) of Na—K—Cl cotransporter (NKCC1).”, J Biol Chem., 18 May 2012; 287 (21): 17308-17), and having the AA_permease_N super family domain at the N-terminus (FIG. 1). This domain corresponds to, for example, the amino acid sequence at positions 210 to 267 of the amino acid sequence of SEQ ID NO: 52 in humans.

[0093] NRG2 protein is a protein encoded by the gene located on chromosome 5q23-q33 in humans, and is typified by a protein consisting of the amino acid sequence of SEQ ID NO: 56, 58, 60, 62 or 64 (NCBI accession No. NP_004874.1 (25 Aug. 2013), NP_053584.1 (25 Aug. 2013), NP_053585.1 (25 Aug. 2013), NP_053586.1 (25 Aug. 2013) or NP_001171864.1 (25 Aug. 2013)). NRG2 protein is a protein belonging to the neuregulin family which controls cell growth and differentiation through interaction with ERBB family receptors (Chang H., Riese D. J. 2nd, Gilbert W., Stern D. F., McMahan U. J., “Ligands for ErbB-family receptors encoded by a neuregulin-like gene.”, Nature, 29 May 1997; 387 (6632): 509-12; Carraway K. L. 3rd, Weber J. L., Unger M. J., Ledesma J., Yu N., Gassmann M., Lai C., “Neuregulin-2, a new ligand of ErbB3/ErbB4-receptor tyrosine kinases.”, Nature, 29 May 1997; 387 (6632): 512-6; Hobbs S. S., Coffing S. L., Le A. T., Cameron E. M., Williams E. E., Andrew M., Blommel E. N., Hammer R. P., Chang H., Riese D. J. 2nd., “Neuregulin isoforms exhibit distinct patterns of ErbB family receptor activation.”, Oncogene, 5 Dec. 2002; 21 (55): 8442-52; and Nakano N., Higashiyama S., Ohmoto H., Ishiguro H., Taniguchi N., Wada Y., “The N-terminal region of NTAK/neuregulin-2 isoforms has an inhibitory activity on angiogenesis.”, J Biol Chem., 19 Mar. 2004; 279 (12): 11465-70.). NRG2 protein is characterized by having the neuregulin family conserved region (FIG. 1). This domain corresponds to, for example, the amino acid sequence at positions 398 to 718 of the amino acid sequence of SEQ ID NO: 56 in humans.

[0094] In NRG2 protein, the I-set domain (e.g., positions 239 to 328 of the amino acid sequence of SEQ ID NO: 56) is present in a region toward the N-terminus relative to the neuregulin family conserved region. Further, there is another isoform having the EGF domain (e.g., positions 353 to 381 of the amino acid sequence of SEQ ID NO: 56) between the I-set domain and the neuregulin family conserved region.

[0095] The SLC12A2-NRG2 fusion polypeptide is a polypeptide comprising the AA_permease_N super family domain of SLC12A2 protein and the neuregulin family conserved region of NRG2 protein, and having intracellular signaling-enhancing activity.

[0096] The SLC12A2-NRG2 fusion polypeptide can contain all of the AA_permease_N super family domain of SLC12A2 protein, or can contain part of the AA_permease_N super family domain as long as the SLC12A2-NRG2 fusion polypeptide has intracellular signaling-enhancing activity.

[0097] The SLC12A2-NRG2 fusion polypeptide can contain all of the neuregulin family conserved region of NRG2 protein, or can contain part of the neuregulin family conserved region as long as the SLC12A2-NRG2 fusion polypeptide has intracellular signaling-enhancing activity.

[0098] The expression saying that the SLC12A2-NRG2 fusion polypeptide “has intracellular signaling-enhancing activity” means that said fusion polypeptide is active in enhancing intracellular signaling due to the neuregulin family conserved region derived from NRG2 protein. This activity is determined by the following method described in Wilson, T. R., et al., Cancer Cell, 2011, 20, 158-172.

[0099] A test substance is added to EFM-19 cells (DSMZ, No. ACC-231) cultured in a serum-starved condition, the cells are treated for 30 minutes and then lysed to extract protein. The phosphorylation of EGFR, ERBB2, ERBB3 or ERBB4 is analyzed by Western blotting. If phosphorylation is higher than in the case where no test substance is added, it is determined that the test substance has intracellular signaling-enhancing activity. As the test substance as referred to herein, the entire SLC12A2-NRG2 fusion polypeptide may be used, or a fragment thereof which lacks a transmembrane domain but contains the neuregulin family conserved region may be used in consideration of solubility or other factors.

[0100] The SLC12A2-NRG2 fusion polypeptide can contain all or part of the I-set domain of NRG2 protein as long as said fusion polypeptide has intracellular signaling-enhancing activity.

[0101] The SLC12A2-NRG2 fusion polypeptide can contain all or part of the EGF domain of NRG2 protein as long as said fusion polypeptide has intracellular signaling-enhancing activity.

[0102] In the present invention, the polynucleotide encoding the SLC12A2-NRG2 fusion polypeptide (hereinafter also referred to as the “SLC12A2-NRG2 fusion polynucleotide”) is a polynucleotide that encodes the polypeptide comprising the AA_permease_N super family domain of SLC12A2 protein and the neuregulin family conserved region of NRG2 protein, and having intracellular signaling-enhancing activity. The SLC12A2-NRG2 fusion polynucleotide can be in the form of any of mRNA, cDNA and genomic DNA.

[0103] The SLC12A2-NRG2 fusion polynucleotide according to the present invention can be, for example, an SLC12A2-NRG2 fusion polynucleotide encoding the polypeptide mentioned below:

(i) a polypeptide consisting of the amino acid sequence of SEQ ID NO: 20, 22, 24, 26 or 28,
(ii) a polypeptide consisting of an amino acid sequence derived from the amino acid sequence of SEQ ID NO: 20, 22, 24, 26 or 28 by deletion, substitution or addition of one or more amino acids, and the polypeptide having intracellular signaling-enhancing activity, or
(iii) a polypeptide consisting of an amino acid sequence having a sequence identity of at least 80% to the amino acid sequence of SEQ ID NO: 20, 22, 24, 26 or 28, and the polypeptide having intracellular signaling-enhancing activity.

[0104] As disclosed below in Examples, the amino acid sequence of SEQ ID NO: 20, 22, 24, 26 or 28 is an amino acid sequence encoded by the SLC12A2-NRG2 fusion polynucleotide comprising partial sequences, which was found in a sample from a human cancer tissue.

[0105] The phrases “one or more amino acids” and “sequence identity of at least 80%” as used above in (ii) and (iii), respectively, have the same meanings as described above in “(1) ATG3-EPHB1 gene fusion”.

[0106] Also, the SLC12A2-NRG2 fusion polynucleotide according to the present invention can be, for example, any one of the polynucleotides mentioned below:

(i) a polynucleotide consisting of the nucleotide sequence of SEQ ID NO: 19, 21, 23, 25 or 27,
(ii) a polynucleotide that hybridizes under stringent conditions with a polynucleotide consisting of a nucleotide sequence complementary to the polynucleotide consisting of the nucleotide sequence of SEQ ID NO: 19, 21, 23, 25 or 27, and which encodes a polypeptide having intracellular signaling-enhancing activity,
(iii) a polynucleotide that consists of a nucleotide sequence derived from the nucleotide sequence of SEQ ID NO: 19, 21, 23, 25 or 27 by deletion, substitution or addition of one or more nucleotides, and which encodes a polypeptide having intracellular signaling-enhancing activity, or
(iv) a polynucleotide that has a sequence identity of at least 80% to the polynucleotide consisting of the nucleotide sequence of SEQ ID NO: 19, 21, 23, 25 or 27, and which encodes a polypeptide having intracellular signaling-enhancing activity.

[0107] As disclosed below in Examples, the nucleotide sequence of SEQ ID NO: 19, 21, 23, 25 or 27 is a nucleotide sequence of an SLC12A2-NRG2 fusion polynucleotide comprising partial sequences, which was found in a sample from a human cancer tissue.

[0108] The phrases “under stringent conditions”, “one or more nucleotides”, and “sequence identity of at least 80%” as used above in (ii), (iii) and (iv), respectively, have the same meanings as described above in “(1) ATG3-EPHB1 gene fusion”.

[0109] <Method for Detecting Gene Fusions Serving as Responsible Mutations (Driver Mutations) for Cancer>

[0110] The present invention provides a method for detecting the above-mentioned three types of gene fusions (hereinafter also referred to as the “inventive detection method”). The inventive detection method comprises the step of detecting any one of the above-mentioned fusion polynucleotides, or a polypeptide encoded thereby, in an isolated sample from a subject.

[0111] In the inventive detection method, the subject is not particularly limited as long as it is a mammal. Examples of the mammal include: rodents such as mouse, rat, hamster, chipmunk and guinea pig; rabbit, pig, cow, goat, horse, sheep, mink, dog, cat; and primates such as human, monkey, cynomolgus monkey, rhesus monkey, marmoset, orangutan, and chimpanzee, with human being preferred.

[0112] The subject may be not only a subject affected by cancer, but also a subject suspected of being affected by cancer or a subject with a future risk of cancer. The “cancer” to which the inventive detection method is to be applied is not particularly limited as long as it is a cancer in which any of the above-mentioned three types of gene fusions can be detected, with gastric cancer being preferred, and special-type gastric cancer, undifferentiated gastric cancer, or moderately differentiated gastric cancer being more preferred.

[0113] The “isolated sample” from the subject encompasses not only biological samples (for example, cells, tissues, organs (e.g., small intestine, spleen, kidney, liver, stomach, lung, adrenal gland, heart, brain, pancreas, and aorta), body fluids (e.g., blood, lymphs, bone marrow fluid), digestive juices, sputum, bronchioalveolar/bronchial lavage fluids, urine, and feces), but also nucleic acid extracts from these biological samples (e.g., genomic DNA extracts, mRNA extracts, and cDNA and cRNA preparations from mRNA extracts) and protein extracts. The genomic DNA, mRNA, cDNA or protein can be prepared by those skilled in the art through considering various factors including the type and state of the sample and selecting a known technique suitable therefor. The sample may also be the one that is fixed with formalin or alcohol, frozen, or embedded in paraffin.

[0114] Further, the “isolated sample” is preferably derived from an organ having or suspected of having the above-mentioned cancer, and more preferably derived from the stomach having or suspected of having the above-mentioned cancer. Examples of the “isolated sample” include, but are not limited to, a gastric tissue from a patient with gastric cancer (preferably, special-type gastric cancer, undifferentiated gastric cancer, or moderately differentiated gastric cancer) or a subject suspected of being affected by gastric cancer, as well as total RNA extracted from said gastric tissue.

[0115] In the inventive detection method, the detection of a fusion polynucleotide or a polypeptide encoded thereby can be made using a per se known technique.

[0116] If the object to be detected is a transcript from a genomic DNA (mRNA, or cDNA prepared from mRNA), a fusion polynucleotide in the form of mRNA or cDNA can be detected using, for example, RT-PCR, sequencing, TaqMan probe method, Northern blotting, dot blotting, or cDNA microarray analysis.

[0117] If the object to be detected is a genomic DNA, a fusion polynucleotide in the form of genomic DNA can be detected using, for example, in situ hybridization (ISH), genomic PCR, sequencing, TaqMan probe method, Southern blotting, or genome microarray analysis.

[0118] Any of the above-mentioned detection techniques can be used alone or in combination. For example, since the above-mentioned three types of gene fusions are believed to contribute to oncogenesis by expressing fusion polypeptides, it is also preferred that if a fusion polynucleotide in the form of genomic DNA is detected (e.g., by in situ hybridization or the like), production of a transcript or a protein should be further confirmed (e.g., by RT-PCR, immunostaining or the like).

[0119] If a fusion polynucleotide is detected by a hybridization technique (e.g., TaqMan probe method, Northern blotting, Southern blotting, dot blotting, microarray analysis, in situ hybridization (ISH)), detection can be made using a polynucleotide that serves as a probe designed to specifically recognize the fusion polynucleotide. As used herein, the phrase “specifically recognize the fusion polynucleotide” means that under stringent conditions, the probe distinguishes and recognizes the fusion polynucleotide from other polynucleotides, including wild-type genes from which to derive both segments of the fusion polynucleotide each extending from the point of fusion toward the 5′- or 3′-end.

[0120] Since biological samples (e.g., biopsy samples) obtained in the course of treatment or diagnosis are often fixed in formalin, it is preferred to use in situ hybridization in the inventive detection method, from the viewpoints that the genomic DNA to be detected is stable even when fixed in formalin and that this technique is high in detection sensitivity.

[0121] According to the in situ hybridization method, the genomic DNA (fusion polynucleotide) encoding a fusion polypeptide can be detected by hybridizing, to such a biological sample, the following polynucleotide (a) or (b) which has a chain length of at least 15 nucleotides and serves as a probe(s) designed to specifically recognize said fusion polynucleotide:

(a) a polynucleotide serving as at least one probe for each of the above-mentioned fusion genes, as selected from the group consisting of a probe that hybridizes to the nucleotide sequence of the fusion partner gene toward the 5′-end (ATG3, TNIK or SLC12A2 gene) and a probe that hybridizes to the nucleotide sequence of the fusion partner gene toward the 3′-end (EPHB1, RNF123 or NRG2 gene); or
(b) a polynucleotide serving as a probe for each of the above-mentioned fusion genes, which hybridizes to a nucleotide sequence containing the point of fusion between the fusion partner gene toward the 5′-end and the fusion partner gene toward the 3′-end.

[0122] The ATG3 gene according to the present invention, as far as it is derived from humans, is typified by a gene consisting of the DNA sequence (encoded into complementary strand) from position 112251354 to position 112280810 in the genome sequence identified in Genbank accession No. NC_000003.11.

[0123] The TNIK gene according to the present invention, as far as it is derived from humans, is typified by a gene consisting of the DNA sequence (encoded into complementary strand) from position 170780292 to position 171178197 in the genome sequence identified in Genbank accession No. NC_000003.11.

[0124] The SLC12A2 gene according to the present invention, as far as it is derived from humans, is typified by a gene consisting of the DNA sequence from position 127419483 to position 127525380 in the genome sequence identified in Genbank accession No. NC_000005.9.

[0125] The EPHB1 gene according to the present invention, as far as it is derived from humans, is typified by a gene consisting of the DNA sequence from position 134514099 to position 134979309 in the genome sequence identified in Genbank accession No. NC_000003.11.

[0126] The RNF123 gene according to the present invention, as far as it is derived from humans, is typified by a gene consisting of the DNA sequence from position 49726950 to position 49758962 in the genome sequence identified in Genbank accession No. NC_000003.11.

[0127] The NRG2 gene according to the present invention, as far as it is derived from humans, is typified by a gene consisting of the DNA sequence (encoded into complementary strand) from position 139226364 to position 139422884 in the genome sequence identified in Genbank accession No. NC_000005.9.

[0128] However, the DNA sequences of genes can change in nature (i.e., in a non-artificial way) due to their mutations and the like. Thus, such native mutants can also be encompassed by the present invention (the same applies hereinafter).

[0129] The polynucleotide mentioned in (a) according to the present invention can be of any type as far as it is capable of detecting the presence of the genomic DNA encoding a fusion polypeptide in the above-mentioned biological sample by hybridizing to a nucleotide sequence(s) targeted by said polynucleotide, i.e., the nucleotide sequence of the fusion partner gene toward the 5′-end (ATG3, TNIK or SLC12A2 gene) and/or the nucleotide sequence of the fusion partner gene toward the 3′-end (EPHB1, RNF123 or NRG2 gene); preferably, the polynucleotide (a) is any of the polynucleotides mentioned below in (a1) to (a3):

(a1) a combination of a polynucleotide that hybridizes to the nucleotide sequence of that region of the fusion partner gene toward the 5′-end which extends upstream from its breakpoint toward the 5′-end (this polynucleotide is hereinafter also referred to as the “5′ fusion partner gene probe 1”), and a polynucleotide that hybridizes to the nucleotide sequence of that region of the fusion partner gene toward the 3′-end which extends downstream from its breakpoint toward the 3′-end (this polynucleotide is hereinafter also referred to as the “3′ fusion partner gene probe 1”);
(a2) a combination of a polynucleotide that hybridizes to the nucleotide sequence of that region of the fusion partner gene toward the 5′-end which extends upstream from its breakpoint toward the 5′-end (this polynucleotide is hereinafter also referred to as the “5′ fusion partner gene probe 1”), and a polynucleotide that hybridizes to the nucleotide sequence of that region of the fusion partner gene toward the 5′-end which extends downstream from its breakpoint toward the 3′-end (this polynucleotide is hereinafter also referred to as the “5′ fusion partner gene probe 2”); and
(a3) a combination of a polynucleotide that hybridizes to the nucleotide sequence of that region of the fusion partner gene toward the 3′-end which extends upstream from its breakpoint toward the 5′-end (this polynucleotide is hereinafter also referred to as the “3′ fusion partner gene probe 2”), and a polynucleotide that hybridizes to the nucleotide sequence of that region of the fusion partner gene toward the 3′-end which extends downstream from its breakpoint toward the 3′-end (this polynucleotide is hereinafter also referred to as the “3′ fusion partner gene probe 1”).

[0130] In the context of (a1) to (a3) above, when the fusion partner gene toward the 5′-end is the ATG3 gene, the nucleotide sequence of that region of the fusion partner gene toward the 5′-end which extends upstream from its breakpoint toward the 5′-end typically contains exon 2 (at positions 508 to 549 in the nucleotide sequence of SEQ ID NO: 29) of the ATG3 gene, and its upstream region.

[0131] In the context of (a1) to (a3) above, when the fusion partner gene toward the 3′-end is the EPHB1 gene, the nucleotide sequence of that region of the fusion partner gene toward the 3′-end which extends downstream from its breakpoint toward the 3′-end typically contains exon 7 (at positions 1798 to 1960 in the nucleotide sequence of SEQ ID NO: 31) of the EPHB1 gene, and its downstream region.

[0132] In the context of (a1) to (a3) above, when the fusion partner gene toward the 5′-end is the TNIK gene, the nucleotide sequence of that region of the fusion partner gene toward the 5′-end which extends upstream from its breakpoint toward the 5′-end typically contains exon 32 (at positions 4205 to 4344 in the nucleotide sequence of SEQ ID NO: 33) of the TNIK gene, and its upstream region.

[0133] In the context of (a1) to (a3) above, when the fusion partner gene toward the 3′-end is the RNF123 gene, the nucleotide sequence of that region of the fusion partner gene toward the 3′-end which extends downstream from its breakpoint toward the 3′-end typically contains exon 6 (at positions 469 to 523 in the nucleotide sequence of SEQ ID NO: 49) of the RNF123 gene, and its downstream region.

[0134] In the context of (a1) to (a3) above, when the fusion partner gene toward the 5′-end is the SLC12A2 gene, the nucleotide sequence of that region of the fusion partner gene toward the 5′-end which extends upstream from its breakpoint toward the 5′-end typically contains exon 4 (at positions 1117 to 1212 in the nucleotide sequence of SEQ ID NO: 51) of the SLC12A2 gene, and its upstream region.

[0135] In the context of (a1) to (a3) above, when the fusion partner gene toward the 3′-end is the NRG2 gene, the nucleotide sequence of that region of the fusion partner gene toward the 3′-end which extends downstream from its breakpoint toward the 3′-end typically contains exon 2 (at positions 931 to 1102 in the nucleotide sequence of SEQ ID NO: 55) of the NRG2 gene, and its downstream region.

[0136] The polynucleotides mentioned above in (a1) can be exemplified by the polynucleotide combinations mentioned below in (a1-1) to (a1-3):

(a1-1) a combination of a polynucleotide that hybridizes to exon 2 of the ATG3 gene, and a polynucleotide that hybridizes to exon 7 of the EPHB1 gene;
(a1-2) a combination of a polynucleotide that hybridizes to exon 32 of the TNIK gene, and a polynucleotide that hybridizes to exon 6 of the RNF123 gene; and
(a1-3) a combination of a polynucleotide that hybridizes to exon 4 of the SLC12A2 gene, and a polynucleotide that hybridizes to exon 2 of the NRG2 gene.

[0137] In the present invention, the region to which the polynucleotide for use for in situ hybridization as mentioned above in (a) is to hybridize (such a region is hereinafter referred to as the “target nucleotide sequence”) is preferred to be located not more than 1000000 nucleotides away from the point of fusion between the fusion partner gene toward the 5′-end (ATG3, TNIK or SLC12A2 gene) and the fusion partner gene toward the 3′-end (EPHB1, RNF123 or NRG2 gene), from the viewpoints of specificity for the target nucleotide sequence and detection sensitivity.

[0138] In the present invention, the polynucleotide for use for in situ hybridization as mentioned above in (b) can be of any type as far as it is capable of detecting the presence of the genomic DNA encoding a fusion polypeptide in the above-mentioned biological sample by hybridizing to a nucleotide sequence targeted by said polynucleotide, i.e., a nucleotide sequence containing the point of fusion between the fusion partner gene toward the 5′-end and the fusion partner gene toward the 3′-end; and typical examples of the polynucleotide (b) are those which each hybridize to a nucleotide sequence containing the point of fusion in the nucleotide sequence of SEQ ID NO: 1, 3, 5, 7, 9, 11, 13, 15, 17, 19, 21, 23, 25 or 27.

[0139] Further, in the present invention, the polynucleotide for use for in situ hybridization as mentioned above in (a) or (b) is preferred to be a group consisting of multiple types of polynucleotides which can cover the entire target nucleotide sequence, from the viewpoints of specificity for the target nucleotide sequence and detection sensitivity. In such a case, each of the polynucleotides constituting the group has a length of at least 15 nucleotides, preferably from 100 to 1000 nucleotides.

[0140] The polynucleotide for use for in situ hybridization as mentioned above in (a) or (b) is preferably labeled with a fluorescent dye or the like for the purpose of detection. Examples of such a fluorescent dye include, but are not limited to, DEAC, FITC, R6G, TexRed, and CyS. Aside from the fluorescent dye, the polynucleotide may also be labeled with a radioactive isotope (e.g. ¹²⁵I, ¹³¹I, ³H, ¹⁴C, ³³P, ³²P), an enzyme (e.g., β-galactosidase, β-glucosidase, alkaline phosphatase, peroxidase, malate dehydrogenase), or a luminescent substance (e.g., luminol, luminol derivative, luciferin, lucigenin, 3,3′-diaminobenzidine (DAB)).

[0141] When in situ hybridization is performed using a combination of 5′ fusion partner gene probe 1 and 3′ fusion partner gene probe 1, a combination of 5′ fusion partner gene probe 1 and 5′ fusion partner gene probe 2, or a combination of 3′ fusion partner gene probe 2 and 3′ fusion partner gene probe 1, the probes of each combination are preferably labeled with different dyes. If, as the result of in situ hybridization using such a combination of probes labeled with different dyes, an overlap is observed between the signal (e.g., fluorescence) emitted from the label on 5′ fusion partner gene probe 1 and the signal emitted from the label on 3′ fusion partner gene probe 1, then it can be determined that a genomic DNA encoding a fusion polypeptide of interest has been detected successfully. Also, if a split is observed between the signal emitted from the label on 5′ fusion partner gene probe 1 and the signal emitted from the label on 5′ fusion partner gene probe 2, or between the signal emitted from the label on 3′ fusion partner gene probe 2 and the signal emitted from the label on 3′ fusion partner gene probe 1, then it can be determined that a genomic DNA encoding a fusion polypeptide of interest has been detected successfully.

[0142] Polynucleotide labeling can be effected by a known method. For example, polynucleotides can be labeled by nick translation or random priming, in which the polynucleotides are caused to incorporate substrate nucleotides labeled with a fluorescent dye or the like.

[0143] The conditions for hybridizing the polynucleotide mentioned above in (a) or (b) to the above-mentioned biological sample by in situ hybridization can vary with various factors including the length of said polynucleotide; and exemplary highly stringent hybridization conditions are 0.2×SSC at 65° C., and exemplary low stringent hybridization conditions are 2.0×SSC at 50° C. Those skilled in the art could realize comparable stringent hybridization conditions to those mentioned above, by appropriately selecting salt concentration (e.g., SSC dilution rate), temperature, and various other conditions including concentrations of surfactant (e.g., NP-40) and formamide, and pH.

[0144] Besides in situ hybridization, other examples of the method for detecting a genomic DNA encoding a fusion polypeptide of interest using the polynucleotide mentioned above in (a) or (b) include Southern blotting, Northern blotting and dot blotting. According to these methods, a fusion gene of interest is detected by hybridizing said polynucleotide (a) or (b) to a membrane in which a nucleic acid extract from the above-mentioned biological sample is transcribed. In the case of using said polynucleotide (a), if a polynucleotide that hybridizes to the nucleotide sequence of the fusion partner gene toward the 5′-end and a polynucleotide that hybridizes to the nucleotide sequence of a fusion partner gene toward the 3′-end both recognize the same band developed in a membrane, then it can be determined that a genomic DNA encoding a fusion polypeptide of interest has been detected successfully.

[0145] Additional examples of the method for detecting a genomic DNA encoding a fusion polypeptide of interest using said polynucleotide (b) include genome microarray analysis and DNA microarray analysis. According to these methods, the genomic DNA is detected by preparing an array in which said polynucleotide (b) is immobilized on a substrate and bringing the above-mentioned biological sample into contact with the polynucleotide immobilized on the array. The substrate is not particularly limited as long as it allows conversion of an oligo- or polynucleotide into a solid phase, and examples include glass plate, nylon membrane, microbeads, silicon chip, and capillary.

[0146] In the inventive detection method, it is also preferred to detect a fusion polynucleotide of interest using PCR.

[0147] PCR can be performed using polynucleotides serving as a pair of primers designed to specifically amplify a fusion polynucleotide using DNA (e.g., genomic DNA, cDNA) or RNA prepared from the above-mentioned biological sample as a template. As used herein, the phrase “specifically amplify a fusion polynucleotide” means that primers do not amplify wild-type genes from which to derive both segments of a fusion polynucleotide of interest each extending from the point of fusion toward the 5′- or 3′-end, but can amplify said fusion polynucleotide alone. It is acceptable to amplify all of the fusion polynucleotide or to amplify that part of the fusion polynucleotide which contains the point of fusion.

[0148] The “polynucleotides serving as a pair of primers” to be used for PCR or the like consist of a sense primer (forward primer) and an anti-sense primer (reverse primer) that specifically amplify a target fusion polynucleotide. The sense primer is designed from the nucleotide sequence of that region of said fusion polynucleotide which extends from the point of fusion toward the 5′-end. The anti-sense primer is designed from the nucleotide sequence of that region of said fusion polynucleotide which extends from the point of fusion toward the 3′-end. From the viewpoints of the accuracy and sensitivity of PCR detection, these primers are commonly designed such that amplified PCR products are not more than 5 kb in size. The primers can be designed as appropriate by a known method, for example, using the Primer Express® software (Applied Biosystems). The length of these polynucleotides is generally not less than 15 nucleotides (preferably not less than 16, 17, 18, 19 or 20 nucleotides, more preferably not less than 21 nucleotides) and not more than 100 nucleotides (preferably not more than 90, 80, 70, 60, 50 or 40 nucleotides, more preferably not more than 30 nucleotides).

[0149] Preferred examples of the “polynucleotides serving as a pair of primers” include: a primer set for the ATG3-EPHB1 fusion polynucleotide, which consists of a polynucleotide consisting of the nucleotide sequence of SEQ ID NO: 65 and a polynucleotide consisting of the nucleotide sequence of SEQ ID NO: 66; a primer set for the TNIK-RNF123 fusion polynucleotide, which consists of a polynucleotide consisting of the nucleotide sequence of SEQ ID NO: 67 and a polynucleotide consisting of the nucleotide sequence of SEQ ID NO: 68; and a primer set for the SLC12A2-NRG2 fusion polynucleotide, which consists of a polynucleotide consisting of the nucleotide sequence of SEQ ID NO: 69 and a polynucleotide consisting of the nucleotide sequence of SEQ ID NO: 70 (refer to Table 1 shown below).

[0150] In the process of detecting a fusion polynucleotide by PCR, direct sequencing is performed on PCR products to sequence a nucleotide sequence containing the point of fusion, whereby it can be confirmed that a gene segment toward the 5′-end and a gene segment toward the 3′-end are joined in-frame and/or that specified domains are contained in the fusion polynucleotide. Sequencing can be done by a known method—it can be easily done by using a sequencer (e.g., ABI-PRISM 310 Genetic Analyzer (Applied Biosystems Inc.)) in accordance with its operating instructions.

[0151] Also, in the process of detecting a fusion polynucleotide by PCR, it can be confirmed by the TaqMan probe method that a gene segment toward the 5′-end and a gene segment toward the 3′-end are joined in-frame and/or that specified domains are contained in the fusion polynucleotide. The probe to be used in the TaqMan probe method can be exemplified by the polynucleotide mentioned above in (a) or (b). The probe is labeled with a reporter dye (e.g., FAM, FITC, VIC) and a quencher (e.g., TAMRA, Eclipse, DABCYL, MGB).

[0152] The above-mentioned primers and probes can be in the form of DNA, RNA, or DNA/RNA chimera, and is preferably in the form of DNA. Alternatively, the primers and probes may be the ones whose nucleotides are partially or wholly substituted with an artificial nucleic acid such as PNA (polyamide nucleic acid: a peptide nucleic acid), LNA™ (Locked Nucleic Acid; a bridged nucleic acid), ENA® (2′-0,4′-C-Ethylene-bridged Nucleic Acid), GNA (glycerol nucleic acid) or TNA (threose nucleic acid). Further, the primers and probes can be double- or single-stranded, and are preferably single-stranded.

[0153] As far as the primers and probes are capable of specifically hybridizing to a target sequence, they may contain one or more nucleotide mismatches, generally have at least 80% identity, preferably at least 90%, at least 91%, at least 92%, at least 93%, or at least 94% identity, more preferably at least 95%, at least 96%, at least 97%, at least 98%, or at least 99% identity, and most preferably 100% identity, to a sequence complementary to the target sequence.

[0154] The primers and probes can be synthesized, for example, according to a conventional method using an automatic DNA/RNA synthesizer on the basis of the information on the nucleotide sequences disclosed in the present specification.

[0155] In the inventive detection method, it is also acceptable to detect a fusion polynucleotide of interest by whole-transcriptome sequencing (RNA sequencing) or genome sequencing. These techniques can be carried out, for example, using a next-generation sequencer (e.g., Genome Analyzer IIx (Illumina), HiSeq sequencer (HiSeq 2000, Illumina), Genome Sequencer FLX System (Roche)), or the like according to the manufacturer's instructions. RNA sequencing can be done by, for example, preparing a cDNA library from a total RNA using a commercially available kit (e.g., mRNA-Seq sample preparation kit (Illumina)) according to the manufacturer's instructions and sequencing the prepared library using a next-generation sequencer.

[0156] In the inventive detection method, if the object to be detected is a translation product of a fusion polynucleotide (i.e., fusion polypeptide), the translation product can be detected using, for example, immunostaining, Western blotting, RIA, ELISA, flow cytometry, immunoprecipitation, or antibody array analysis. These techniques use an antibody that specifically recognizes a fusion polypeptide. As used herein, the phrase “specifically recognizes a fusion polypeptide” means that besides the fusion polypeptide, an antibody recognizes no other proteins, including wild-type proteins from which to derive both segments of said fusion polynucleotide each extending from the point of fusion toward the N- or C-terminus. The antibody that “specifically recognizes a fusion polypeptide”, which is to be used in the inventive detection method, can be one antibody or a combination of two or more antibodies.

[0157] The “antibody that specifically recognizes a fusion polypeptide” can be exemplified by an antibody specific to a polypeptide containing the point of fusion of said fusion polypeptide (hereinafter referred to as the “fusion point-specific antibody”). As referred to herein, the “fusion point-specific antibody” means an antibody that specifically binds to the polypeptide containing the point of fusion but does not bind to wild-type proteins from which to derive the segments of the fusion polypeptide each extending toward the N- or C-terminus.

[0158] Also, the “antibody that specifically recognizes a fusion polypeptide” can be exemplified by a combination of an antibody binding to a polypeptide consisting of that region of the fusion polypeptide which extends from the point of fusion toward the N-terminus and an antibody binding to a polypeptide consisting of that region of the fusion polypeptide which extends from the point of fusion toward the C-terminus. The fusion polypeptide can be detected by performing sandwich ELISA, immunostaining, immunoprecipitation, Western blotting or the like using these two antibodies.

[0159] In the present invention, examples of the antibodies include, but are not limited to, natural antibodies such as polyclonal antibodies and monoclonal antibodies (mAb), and chimeric, humanized and single-stranded antibodies which can be prepared using genetic recombination techniques, and binding fragments thereof. The “binding fragments” refers to partial regions of the above-mentioned antibodies which have specific binding activity, and specific examples include Fab, Fab′, F(ab′)₂, Fv, and single-chain antibodies. The class of antibody is not particularly limited, and any isotype of antibody, such as IgG, IgM, IgA, IgD or IgE, is acceptable, with IgG being preferred in consideration of ease of purification or other factors.

[0160] The “antibody that specifically recognizes a fusion polypeptide” can be prepared by those skilled in the art through appropriate selection of a known technique. Examples of such a known technique include: a method in which a polypeptide containing the point of fusion of the fusion polypeptide, a polypeptide consisting of that region of the fusion polypeptide which extends from the point of fusion toward the N-terminus, or a polypeptide consisting of that region of the fusion polypeptide which extends from the point of fusion toward the C-terminus is inoculated into an immune animal, the immune system of the animal is activated, and then the serum (polyclonal antibody) of the animal is collected; as well as monoclonal antibody preparation methods such as hybridoma method, recombinant DNA method, and phage display method. Commercially available antibodies may also be used. If an antibody having a labeling agent attached thereto is used, the target protein can be detected directly by detecting this label. The labeling agent is not particularly limited as long as it is capable of binding to an antibody and is detectable, and examples include peroxidase, β-D-galactosidase, microperoxidase, horseradish peroxidase (HRP), fluorescein isothiocyanate (FITC), rhodamine isothiocyanate (RITC), alkaline phosphatase, biotin, and radioactive materials. Aside from the direct detection of the target protein using the antibody having a labeling agent attached thereto, the target protein can also be detected indirectly using a secondary antibody having a labeling agent attached thereto, Protein G or A, or the like.

[0161] <Kit for Detecting Gene Fusions Serving as Responsible Mutations (Driver Mutations) for Cancer>

[0162] As described above, fusion polynucleotides produced by gene fusions serving as responsible mutations for cancer, or polypeptides encoded thereby, can be detected using such a primer, probe, or antibody as mentioned above, or a combination thereof, and thereby the gene fusions can be detected. Thus, the present invention provides a kit for detecting a gene fusion serving as a responsible mutation for cancer, the kit comprising any or a combination of (A) to (C) below (hereinafter also referred to as the “inventive kit”):

(A) a polynucleotide that serves as a probe designed to specifically recognize an ATG3-EPHB1 fusion polynucleotide, a TNIK-RNF123 fusion polynucleotide, or an SLC12A2-NRG2 fusion polynucleotide;
(B) polynucleotides that serve as a pair of primers designed to enable specific amplification of an ATG3-EPHB1 fusion polynucleotide, a TNIK-RNF123 fusion polynucleotide, or an SLC12A2-NRG2 fusion polynucleotide; and
(C) an antibody that specifically recognizes an ATG3-EPHB1 fusion polypeptide, a TNIK-RNF123 fusion polypeptide, or an SLC12A2-NRG2 fusion polypeptide.

[0163] In addition to the above-mentioned polynucleotide(s) or antibody, the inventive kit can also contain an appropriate combination of other components, including: a substrate required for detecting a label attached to the polynucleotide(s) or the antibody; a positive control (e.g., ATG3-EPHB1 fusion polynucleotide, TNIK-RNF123 fusion polynucleotide, or SLC12A2-NRG2 fusion polynucleotide; or ATG3-EPHB1 fusion polypeptide, TNIK-RNF123 fusion polypeptide, or SLC12A2-NRG2 fusion polypeptide; or cells bearing the same); a negative control; a PCR reagent; a counterstaining reagent for use for in situ hybridization or the like (e.g., DAPI); a molecule required for antibody detection (e.g., secondary antibody, Protein G, Protein A); and a buffer solution for use in sample dilution or washing. The inventive kit can also contain instructions for use thereof. The above-mentioned inventive detection method can be easily carried out by using the inventive kit.

[0164] The inventive detection method and kit, which enable detection of the gene fusions newly discovered as responsible mutations for cancer, are very useful in identifying subjects positive for said gene fusion and applying personalized medicine to each of the subjects, as described below.

[0165] <Method for Identifying Patients with Cancer or Subjects with a Risk of Cancer>

[0166] The above-mentioned three types of gene fusions, serving as responsible mutations for cancer, are each believed to lead to constitutive activation of EPHB1 kinase activity, constitutive activation of TNIK kinase activity, and enhancement of the function of NRG2 as a cell growth factor, thereby contributing to malignant transformation of cancers. Thus, cancer patients in whom such a gene fusion is detected are highly probable to be responsive to the treatment with a substance suppressing the expression and/or activity of a polypeptide encoded by a fusion polynucleotide produced by said gene fusion.

[0167] Thus, the present invention provides a method for identifying patients with cancer or subjects with a risk of cancer, in whom substances suppressing the expression and/or activity of polypeptides encoded by fusion polynucleotides produced by gene fusions serving as responsible mutations (driver mutations) for cancer show a therapeutic effect (hereinafter also referred to as the “inventive identification method”).

[0168] The inventive identification method comprises the steps of:

(1) detecting a fusion polynucleotide of any one of (a) to (c) below, or a polypeptide encoded thereby, in an isolated sample from a subject:

[0169] (a) an ATG3-EPHB1 fusion polynucleotide which encodes a polypeptide comprising the kinase domain of EPHB1 and having kinase activity;

[0170] (b) a TNIK-RNF123 fusion polynucleotide which encodes a polypeptide comprising the kinase domain of TNIK and the SPRY domain and RING finger domain of RNF123, and having kinase activity; and

[0171] (c) an SLC12A2-NRG2 fusion polynucleotide which encodes a polypeptide comprising the AA_permease_N super family domain of SLC12A2 and the neuregulin family conserved region of NRG2, and having intracellular signaling-enhancing activity; and

(2) determining that the substance suppressing the expression and/or activity of the polypeptide shows a therapeutic effect in the subject, in the case where the fusion polynucleotide of any one of (a) to (c) or the polypeptide encoded thereby is detected.

[0172] In the inventive identification method, the phrase “a patient with cancer or a subject with a risk of cancer” refers to a mammal, preferably human, which is, or is suspected of being, affected by cancer. The “cancer” to which the inventive identification method is to be applied is not particularly limited as long as it is a cancer in which any of the above-mentioned three types of gene fusions can be detected, with gastric cancer being preferred, and special-type gastric cancer, undifferentiated gastric cancer, or moderately differentiated gastric cancer being more preferred.

[0173] In the inventive identification method, the “therapeutic effect” is not particularly limited as long as it is a beneficial effect of cancer treatment for a patient, and examples include a tumor shrinkage effect, a progression-free survival prolongation effect, and a life lengthening effect.

[0174] In the inventive identification method, the “substance suppressing the expression and/or activity of a polypeptide encoded by a fusion polynucleotide produced by a gene fusion serving as a responsible mutation (driver mutation) for cancer”, which is to be evaluated for its effectiveness in the treatment of cancer associated with the ATG3-EPHB1 gene fusion (this substance is hereinafter also referred to as the “substance to be evaluated in the inventive identification method”), is not particularly limited as long as it is a substance that directly or indirectly inhibits the expression and/or function of an ATG3-EPHB1 fusion polypeptide.

[0175] Examples of the substance inhibiting the expression of an ATG3-EPHB1 fusion polypeptide include: siRNAs (small interfering RNAs), shRNAs (short hairpin RNAs), miRNAs (micro RNAs), and antisense nucleic acids which suppress the expression of an ATG3-EPHB1 fusion polypeptide; expression vectors capable of expressing these polynucleotides; and low-molecular-weight compounds.

[0176] Examples of the substance inhibiting the function of an ATG3-EPHB1 fusion polypeptide include substances inhibiting EPHB1 kinase activity (e.g., low-molecular-weight compounds), and antibodies binding to an ATG3-EPHB1 fusion polypeptide.

[0177] These substances may be substances that specifically suppress the expression and/or activity of an ATG3-EPHB1 fusion polypeptide, or may be substances that suppress even the expression and/or activity of wild-type EPHB1 protein. Specific examples of such substances include, but are not limited to, dasatinib, PD-173955, foretinib, bosutinib, crizotinib, AST-487, staurosporine, vandetanib, MLN-8054, TAE 684, nilotinib, dorsomorphin, Cdk1/2 inhibitor III, IKK-2 inhibitor IV, GSK-3β inhibitor XII, and PP1 Analog II (cf., Ephrin receptor family: EPH receptor B1. Last modified on 26 Mar. 2013. Accessed on Oct. 12, 2013. IUPHAR database (IUPHAR-DB), http://www.iuphar-db.org/DATABASE/ObjectDisplayForward?objectId=1830).

[0178] These substances can be prepared by a per se known technique on the basis of the sequence information of an ATG3-EPHB1 fusion polynucleotide and/or an ATG3-EPHB1 fusion polypeptide which are disclosed in the present specification, or other data. Commercially available substances may also be used.

[0179] These substances are effective as cancer therapeutic agents for a subject, in the case where an ATG3-EPHB1 fusion polynucleotide or a polypeptide encoded thereby is detected in an isolated sample from said subject.

[0180] As regards TNIK-RNF123 gene fusion, the substance to be evaluated in the inventive identification method is not particularly limited as long as it is a substance that directly or indirectly inhibits the expression and/or function of a TNIK-RNF123 fusion polypeptide.

[0181] Examples of the substance inhibiting the expression of a TNIK-RNF123 fusion polypeptide include: siRNAs (small interfering RNAs), shRNAs (short hairpin RNAs), miRNAs (micro RNAs), and antisense nucleic acids which suppress the expression of a TNIK-RNF123 fusion polypeptide; expression vectors capable of expressing these polynucleotides; and low-molecular-weight compounds.

[0182] Examples of the substance inhibiting the function of a TNIK-RNF123 fusion polypeptide include substances inhibiting TNIK kinase activity (e.g., low-molecular-weight compounds), and antibodies binding to a TNIK-RNF123 fusion polypeptide.

[0183] These substances may be substances that specifically suppress the expression and/or activity of a TNIK-RNF123 fusion polypeptide, or may be substances that suppress even the expression and/or activity of wild-type TNIK protein. Specific examples of such substances include, but are not limited to, aminothiazole derivatives (refer to WO 2010/064111) and 4-phenyl-2-phenylaminopyridine-based compounds (refer to Ho K. K., et al., Bioorg Med Chem Lett, 2013, 23 (2): 569-73 (Epub 16 Nov. 2012)).

[0184] These substances can be prepared by a per se known technique on the basis of the sequence information of a TNIK-RNF123 fusion polynucleotide and/or a TNIK-RNF123 fusion polypeptide which are disclosed in the present specification, or other data. Commercially available substances may also be used.

[0185] These substances are effective as cancer therapeutic agents for a subject, in the case where a TNIK-RNF123 fusion polynucleotide or a polypeptide encoded thereby is detected in an isolated sample from said subject.

[0186] As regards SLC12A2-NRG2 gene fusion, the substance to be evaluated in the inventive identification method is not particularly limited as long as it is a substance that directly or indirectly inhibits the expression and/or function of an SLC12A2-NRG2 fusion polypeptide.

[0187] Examples of the substance inhibiting the expression of an SLC12A2-NRG2 fusion polypeptide include: siRNAs (small interfering RNAs), shRNAs (short hairpin RNAs), miRNAs (micro RNAs), and antisense nucleic acids which suppress the expression of an SLC12A2-NRG2 fusion polypeptide; expression vectors capable of expressing these polynucleotides; and low-molecular-weight compounds.

[0188] Examples of the substance inhibiting the function of an SLC12A2-NRG2 fusion polypeptide include substances inhibiting the intracellular signaling-enhancing activity of NRG2 (e.g., low-molecular-weight compounds), and antibodies binding to an SLC12A2-NRG2 fusion polypeptide.

[0189] These substances may be substances that specifically suppress the expression and/or activity of an SLC12A2-NRG2 fusion polypeptide, or may be substances that suppress even the expression and/or activity of wild-type NRG2 protein.

[0190] These substances can be prepared by a per se known technique on the basis of the sequence information of an SLC12A2-NRG2 fusion polynucleotide and/or an SLC12A2-NRG2 fusion polypeptide which are disclosed in the present specification, or other data. Commercially available substances may also be used.

[0191] Further, since wild-type NRG2 protein is believed to enhance intracellular signaling via a protein belonging to a group of HER proteins serving as receptors for the wild-type NRG2 protein, the substance to be evaluated in the inventive identification method can also be exemplified by substances that directly or indirectly inhibit the expression and/or function of HER proteins. As referred to herein, the group of HER proteins is a group of tyrosine kinase receptors which consists of the following four proteins: HER1 (ErbB1), HER2 (ErbB2), HER3 (ErbB3), and HER4 (ErbB4).

[0192] Examples of the substances inhibiting the expression of HER proteins include: siRNAs (small interfering RNAs), shRNAs (short hairpin RNAs), miRNAs (micro RNAs), and antisense nucleic acids which suppress the expression of HER proteins; expression vectors capable of expressing these polynucleotides; and low-molecular-weight compounds.

[0193] Examples of the substances inhibiting the function of HER proteins include substances inhibiting the kinase activity of HER proteins (e.g., low-molecular-weight compounds), and antibodies binding to HER proteins. Specific examples of such substances include rapatinib, afatinib, dacomitinib, and trastuzumab.

[0194] These substances can be prepared by a per se known technique on the basis of known sequence information or other data. Commercially available substances may also be used.

[0195] These substances are effective as cancer therapeutic agents for a subject, in the case where an SLC12A2-NRG2 fusion polynucleotide or a polypeptide encoded thereby is detected in an isolated sample from said subject.

[0196] Step (1) in the inventive identification method can be carried out in the same way as the step included in the inventive detection method mentioned above.

[0197] At step (2) in the inventive identification method, the substance to be evaluated in the inventive identification method is determined to show a therapeutic effect in a subject (i.e., a patient with cancer or a subject with a risk of cancer), in the case where a fusion polynucleotide of interest or a polypeptide encoded thereby is detected in an isolated sample from the subject at step (1); however, the substance to be evaluated in the inventive identification method is determined to be unlikely to show a therapeutic effect in the subject, in the case where neither the fusion polynucleotide of interest nor the polypeptide encoded thereby is detected.

[0198] According to the inventive identification method, it is possible to detect subjects positive for the gene fusions newly discovered as responsible mutations for cancer from among patients with cancer or subjects with a risk of cancer, and to identify patients with cancer or subjects with a risk of cancer, in whom substances suppressing the expression and/or activity of polypeptides encoded by fusion polynucleotides produced by said gene fusions show a therapeutic effect; thus, the present invention is useful in that it enables provision of suitable treatment for such subjects.

[0199] <Method for Treatment of Cancer and Cancer Therapeutic Agent>

[0200] As described above, the inventive identification method allows identification of patients with cancer, in whom substances suppressing the expression and/or activity of polypeptides encoded by fusion polynucleotides produced by any of the above-mentioned three types of gene fusions show a therapeutic effect. Thus, efficient cancer treatment can be performed by administering said substance selectively to a cancer patient who carries said fusion gene. Therefore, the present invention provides a method for treating cancer, comprising the step of administering said substance to a subject (hereinafter also referred to as the “inventive treatment method”).

[0201] In the inventive treatment method, the subject is typified by a patient with cancer positive for ATG3-EPHB1, TNIK-RNF123 or SLC12A2-NRG2 gene fusion. The cancer is not particularly limited, and is preferably gastric cancer, more preferably special-type gastric cancer, undifferentiated gastric cancer, or moderately differentiated gastric cancer. As referred to herein, the cancer positive for ATG3-EPHB1, TNIK-RNF123 or SLC12A2-NRG2 gene fusion refers to a cancer in which a fusion polynucleotide or a polypeptide encoded thereby is detected, for any of these gene fusions, by the inventive detection method.

[0202] Also, the present invention provides a therapeutic agent for cancer positive for ATG3-EPHB1, TNIK-RNF123 or SLC12A2-NRG2 gene fusion (hereinafter also referred to as the “inventive cancer therapeutic agent”). For the cancers positive for the above-mentioned three types of gene fusions, no treatment targeting these gene fusions has been performed. Also, the presence of these gene fusions was totally unpredictable even in consideration of any prior art documents or other information. Therefore, the inventive cancer therapeutic agent provides novel therapeutic measures effective for the cancers positive for the above-mentioned three types of gene fusions.

[0203] In the inventive cancer therapeutic agent, the cancer is not particularly limited, and is preferably gastric cancer, more preferably special-type gastric cancer, undifferentiated gastric cancer, or moderately differentiated gastric cancer.

[0204] The inventive cancer therapeutic agent typically comprises, as an active ingredient, a substance suppressing the expression and/or activity of: an ATG3-EPHB1 fusion polypeptide comprising the kinase domain of EPHB1 and having kinase activity; a TNIK-RNF123 fusion polypeptide comprising the kinase domain of TNIK and the SPRY domain and RING finger domain of RNF123 and having kinase activity; or an SLC12A2-NRG2 fusion polypeptide comprising the AA_permease_N super family domain of SLC12A2 and the neuregulin family conserved region of NRG2, and having intracellular signaling-enhancing activity.

[0205] In the context of the inventive treatment method and inventive cancer therapeutic agent, the substances suppressing the expression and/or activity of the above-mentioned three types of fusion polypeptides can be exemplified by the substances listed above in <Method for identifying patients with cancer or subjects with a risk of cancer>.

[0206] The inventive cancer therapeutic agent can be formulated into a pharmaceutical composition with the use of a pharmaceutically acceptable carrier, excipient and/or other additives which are commonly used in pharmaceutical manufacturing.

[0207] The method for administering the inventive cancer therapeutic agent is selected as appropriate depending on various factors including the type of this suppressing agent and the type of cancer, and exemplary modes of administration that can be adopted include oral, intravenous, intraperitoneal, transdermal, intramuscular, intratracheal (aerosol), rectal and intravaginal administrations.

[0208] The dose of the inventive cancer therapeutic agent can be determined as appropriate in consideration of various factors, including the activity and type of an active ingredient, the mode of administration (e.g., oral or parenteral administration), the severity of a disease, and the animal species, drug receptivity, body weight, and age of the subject to be treated with the inventive agent.

[0209] The treatment method and cancer therapeutic agent of the present invention are useful in that they allow treatment of patients having the particular responsible mutations for cancer which have been conventionally unknown and were first discovered according to this invention.

[0210] <Method for Screening Cancer Therapeutic Agents>

[0211] The present invention provides a method for screening cancer therapeutic agents which show a therapeutic effect in cancer patients having any of the above-mentioned three types of gene fusions (hereinafter also referred to as the “inventive screening method”). According to the inventive screening method, substances suppressing the expression and/or activity of any of the above-mentioned three types of fusion polypeptides (i.e., ATG3-EPHB1 fusion polypeptide, TNIK-RNF123 fusion polypeptide, and SLC12A2-NRG2 fusion polypeptide) can be obtained as cancer therapeutic agents.

[0212] The test substance to be subjected to the inventive screening method can be any compound or composition, and can be exemplified by nucleic acids (e.g., nucleoside, oligonucleotide, polynucleotide), saccharides (e.g., monosaccharide, disaccharide, oligosaccharide, polysaccharide), fats (e.g., saturated or unsaturated, straight-chain, branched-chain and/or cyclic fatty acids), amino acids, proteins (e.g., oligopeptide, polypeptide), low-molecular-weight compounds, compound libraries, random peptide libraries, natural ingredients (e.g., ingredients derived from microbes, animals and plants, marine organisms, and others), foods, and the like.

[0213] The inventive screening method can be of any type as long as it enables evaluation of whether a test substance suppresses the expression and/or activity of any of the above-mentioned three types of fusion polypeptides. Typically, the inventive screening method comprises the following steps:

(1) bringing a cell expressing an ATG3-EPHB1 fusion polypeptide, a TNIK-RNF123 fusion polypeptide, or an SLC12A2-NRG2 fusion polypeptide into contact with a test substance;
(2) determining whether the expression and/or activity of any of said fusion polypeptides is suppressed or not; and
(3) selecting the substance determined to suppress the expression and/or activity of any of said fusion polypeptides, as a cancer therapeutic agent.

[0214] At step (1), the cell expressing any of the above-mentioned three types of fusion polypeptides is brought into contact with the test substance. A test substance-free solvent (e.g., DMSO) can be used as a control. The contact can be effected in a medium. The medium is selected as appropriate depending on various factors including the type of the cell to be used, and examples include a minimum essential medium (MEM) supplemented with about 5-20% fetal bovine serum, a Dulbecco's modified eagle's medium (DMEM), RPMI1640 medium, and 199 medium. The culture conditions are also selected as appropriate depending on various factors including the type of the cell to be used, and for example, the pH of the medium is in the range of approximately from 6 to 8, the culture temperature is in the range of approximately from 30 to 40° C., and the culture time is in the range of approximately from 12 to 72 hours.

[0215] Examples of the cell expressing any of the above-mentioned three types of fusion polypeptides include, but are not limited to, cancer tissue-derived cells intrinsically expressing said fusion polypeptides, cell lines induced from said cells, and cell lines made by genetic engineering. Whether a cell expresses any of the above-mentioned three types of fusion polypeptides can also be confirmed using the inventive detection method described above. The cell is generally a mammalian cell, preferably a human cell.

[0216] At step (2), it is determined whether the test substance suppresses the expression and/or activity of any of said fusion polypeptides or not. The expression of fusion polypeptides can be measured by determining the mRNA or protein level in a cell using a known analysis technique such as Northern blotting, quantitative PCR, immunoblotting, or ELISA. Also, the activity of fusion polypeptides can be measured by a known analysis technique (e.g., kinase activity assay). A resulting measured value is compared with a value measured in a control cell not contacted with the test substance. The comparison of the measured values is made preferably based on the presence or absence of a significant difference. If the value measured in the cell contacted with the test substance is significantly lower than that measured in the control cell, it can be determined that the test substance suppresses the expression and/or activity of any of said fusion polypeptides.

[0217] Alternatively, given the fact that the cells expressing these types of fusion polypeptides show enhanced growth, the growth of said cells can be used as an indicator for the determination at this step. In this case, the growth of such a cell contacted with the test substance is measured as a first step. The cell growth measurement can be made by a per se known technique such as cell count, ³H-thymidine incorporation, or BRDU. Next, the growth of the cell contacted with the test substance is compared with that of a control cell not contacted with the test substance. The growth level comparison is made preferably based on the presence or absence of a significant difference. The value for the growth of the control cell not contacted with the test substance can be measured prior to, or at the same time as, the measurement of the growth of the cell contacted with the test substance, but is preferably measured at the same time from the viewpoints of the accuracy and reproducibility of the test. If the results of the comparison show that the growth of the cell contacted with the test substance is suppressed, it can be determined that the test substance suppresses the expression and/or activity of any of said fusion polypeptides.

[0218] At step (3), the test substance determined to suppress the expression and/or activity of any of said fusion polypeptides at step (2) is selected as a cancer therapeutic agent.

[0219] Hence, the inventive screening method makes it possible to obtain cancer therapeutic agents applicable to the treatment of patients with responsible mutations for cancer which have been conventionally unknown.

[0220] <Isolated Fusion Polypeptides or Fragments Thereof, and Polynucleotides Encoding the Same>

[0221] The present invention provides isolated fusion polypeptides (hereinafter also referred to as the “inventive fusion polypeptides”) as mentioned below, or fragments thereof:

(1) an isolated ATG3-EPHB1 fusion polypeptide which comprises the kinase domain of EPHB1 protein and has kinase activity;
(2) an isolated TNIK-RNF123 fusion polypeptide which comprises the kinase domain of TNIK protein and the SPRY domain and RING finger domain of RNF123 protein and has kinase activity; and
(3) an isolated SLC12A2-NRG2 fusion polypeptide which comprises the AA_permease_N super family domain of SLC12A2 protein and the neuregulin family conserved region of NRG2 protein, and has intracellular signaling-enhancing activity.

[0222] For the purpose of the present specification, the “isolated” substance refers to a substance substantially separated or purified from other substances (preferably, biological factors) found in an environment in which the substance naturally occurs (e.g., in a cell of an organism) (for example, if the substance of interest is a nucleic acid, the “other substances” corresponds to other factors than nucleic acids as well as nucleic acids containing other nucleic acid sequences than that of the nucleic acid of interest; and if the substance of interest is a protein, the “other substances” corresponds to other factors than proteins as well as proteins containing other amino acid sequences than that of the protein of interest). For the purpose of the specification, the term “isolated” means that a substance has a purity of preferably at least 75% by weight, more preferably at least 85% by weight, still more preferably at least 95% by weight, and most preferably at least 96% by weight, at least 97% by weight, at least 98% by weight, at least 99% by weight, or 100%. Examples of the “isolated” polynucleotide and polypeptide include not only polynucleotides and polypeptides purified by standard purification techniques but also chemically synthesized polynucleotides and polypeptides.

[0223] Other terms used above in (1) to (3) have the same meanings as defined above in <Specific responsible mutations for cancer>.

[0224] The “fragments” refers to fragments of the inventive fusion polypeptides, which each consist of a consecutive partial sequence comprising sequences upstream and downstream from the point of fusion. The sequence upstream from the point of fusion, as contained in said partial sequence, can comprise at least one amino acid residue (for example, at least 2, 3, 4, 5, 6, 7, 8, 9, 10, 20, 30, 40, 50 or 100 amino acid residues) ranging from the point of fusion to the N-terminus of any of the inventive fusion polypeptides. The sequence downstream from the point of fusion, as contained in said partial sequence, can comprise at least one amino acid residue (for example, at least 2, 3, 4, 5, 6, 7, 8, 9, 10, 20, 30, 40, 50 or 100 amino acid residues) ranging from the point of fusion to the C-terminus of any of the inventive fusion polypeptides. The length of the fragments is not particularly limited, and is generally at least 8 amino acid residues (for example, at least 9, 10, 11, 12, 13, 14, 15, 20, 25, 50 or 100 amino acid residues).

[0225] Also, the inventive fusion polypeptides can be, for example, the isolated fusion polypeptides mentioned below:

(1) an ATG3-EPHB1 fusion polypeptide which is any one of (i) to (iii) below:

[0226] (i) a polypeptide consisting of the amino acid sequence of SEQ ID NO: 2,

[0227] (ii) a polypeptide consisting of an amino acid sequence derived from the amino acid sequence of SEQ ID NO: 2 by deletion, substitution or addition of one or more amino acids, and the polypeptide having kinase activity, or

[0228] (iii) a polypeptide consisting of an amino acid sequence having a sequence identity of at least 80% to the amino acid sequence of SEQ ID NO: 2, and the polypeptide having kinase activity;

(2) a TNIK-RNF123 fusion polypeptide which is any one of (i) to (iii) below:

[0229] (i) a polypeptide consisting of the amino acid sequence of SEQ ID NO: 4, 6, 8, 10, 12, 14, 16 or 18,

[0230] (ii) a polypeptide consisting of an amino acid sequence derived from the amino acid sequence of SEQ ID NO: 4, 6, 8, 10, 12, 14, 16 or 18 by deletion, substitution or addition of one or more amino acids, and the polypeptide having kinase activity, or

[0231] (iii) a polypeptide consisting of an amino acid sequence having a sequence identity of at least 80% to the amino acid sequence of SEQ ID NO: 4, 6, 8, 10, 12, 14, 16 or 18, and the polypeptide having kinase activity; and

(3) an SLC12A2-NRG2 fusion polypeptide which is any one of (i) to (iii) below:

[0232] (i) a polypeptide consisting of the amino acid sequence of SEQ ID NO: 20, 22, 24, 26 or 28,

[0233] (ii) a polypeptide consisting of an amino acid sequence derived from the amino acid sequence of SEQ ID NO: 20, 22, 24, 26 or 28 by deletion, substitution or addition of one or more amino acids, and the polypeptide having intracellular signaling-enhancing activity, or

[0234] (iii) a polypeptide consisting of an amino acid sequence having a sequence identity of at least 80% to the amino acid sequence of SEQ ID NO: 20, 22, 24, 26 or 28, and the polypeptide having intracellular signaling-enhancing activity.

[0235] The terms used above in (i) to (iii) have the same meanings as defined above in <Specific responsible mutations for cancer>.

[0236] Further, the present invention provides isolated polynucleotides encoding the inventive fusion polypeptides or the fragments thereof as described above (hereinafter also referred to as the “inventive polynucleotides”). The inventive polynucleotides can be in the form of any of mRNA, cDNA and genomic DNA. Also, the polynucleotides may be double- or single-stranded.

[0237] A typical example of the cDNA encoding the ATG3-EPHB1 fusion polypeptide is a polynucleotide consisting of the nucleotide sequence of SEQ ID NO: 1.

[0238] Typical examples of the cDNA encoding the TNIK-RNF123 fusion polypeptide are polynucleotides each consisting of the nucleotide sequence of SEQ ID NO: 3, 5, 7, 9, 11, 13, 15 or 17.

[0239] Typical examples of the cDNA encoding the SLC12A2-NRG2 fusion polypeptide are polynucleotides each consisting of the nucleotide sequence of SEQ ID NO: 19, 21, 23, 25 or 27.

[0240] The inventive polynucleotides can be made by a per se known technique. For example, the inventive polynucleotides can be extracted using a known hybridization technique from a cDNA library or genomic library prepared from cancer tissues or the like harboring an ATG3-EPHB1 fusion polynucleotide, a TNIK-RNF123 fusion polynucleotide, or an SLC12A2-NRG2 fusion polynucleotide. The inventive polynucleotides can also be prepared by amplification utilizing a known gene amplification technique (PCR), with mRNA, cDNA or genomic DNA prepared from the cancer tissues or the like being used as a template. Alternatively, the polynucleotides can be prepared utilizing a known gene amplification or genetic recombination technique such as PCR, restriction enzyme treatment, or site-directed mutagenesis (Kramer, W. & Fritz, H. J., Methods Enzymol., 1987, 154, 350), using, as starting materials, the cDNAs of wild-type genes from which to derive those segments of each of the fusion polynucleotides which extend toward the 5′- or 3′-end.

[0241] The inventive fusion polypeptides or fragments thereof can also be made by a per se known technique. For example, after such a polynucleotide prepared as mentioned above is inserted into an appropriate expression vector, the vector is introduced into a cell-free protein synthesis system (e.g., reticulocyte extract, wheat germ extract) and the system is incubated, or alternatively the vector is introduced into appropriate cells (e.g., E coli., yeast, insect cells, animal cells) and the resulting transformant is cultured; in either of the above ways, the inventive fusion polypeptides can be prepared.

[0242] The inventive fusion polypeptides or fragments thereof can be used as a marker in the inventive detection method or the like, or can be used in other applications including preparation of antibodies against the inventive fusion polypeptides.

### EXAMPLES

[0243] Hereunder, the present invention will be more specifically described by way of working examples, but this invention is not limited to the examples given below.

[0244] <Samples>

[0245] As samples for RNA sequencing, total RNAs were prepared by a conventional method from gastric tissues taken from 51 patients with gastric cancer (GC) (5 with moderately differentiated GC, 3 with special-type mucinous GC, and 43 with undifferentiated GC). As samples for RT-PCR and Sanger sequencing, total RNAs were prepared by a conventional method from gastric tissues taken from 149 patients with gastric cancer (27 with highly differentiated GC, 65 with moderately differentiated GC, 2 with special-type mucinous GC, and 55 with undifferentiated GC). The present study was conducted with the approval by the institutional review boards of the institutions involved in the study.

[0246] <RNA Sequencing>

[0247] RNA sequencing libraries were prepared using the TruSeq RNA Sample Prep Kit v2 produced by Illumina according to the manufacturer's standard protocol. These libraries were subjected to paired-end sequencing of 100 by reads on the next-generation sequencer Hiseq2000 or GAIIx. The resulting paired-end reads were compared to the RefSeq (NCBI Reference Sequence) database to thereby detect fusion gene candidates.

[0248] <RT-PCR, Sanger Sequencing>

[0249] cDNAs were synthesized by a reverse transcriptase method from the total RNAs extracted from the gastric tissues taken from the gastric cancer patients. The resulting cDNAs were subjected to PCR amplification. The obtained PCR products were directly nucleotide-sequenced using the BigDye Terminator Kit and the ABI 3130xl DNA Sequencer (Applied Biosystems). The primers used in this study are shown in Table 1.

TABLE 1

| | | | RT-PCR |
|---|---|---|---|
| | | | product |
| Fusion | | Anti-sense | size |
| gene | Sense primer | primer | (bp) |
| ATG3- | CACTGGAAGTGGCTG | GCCGCAGCCCATCAA | 150 |
| EPHB1 | AGTACCTGA | TCCTT | |
| | (SEQ ID NO: 65) | (SEQ ID NO: 66) | |
| TNIK- | GGTCAGTGGAAACAG | ACGCCTTGCCATAAT | 318 |
| RNF123 | GACATTTGG | TCGTTGT | |
| | (SEQ ID NO: 67) | (SEQ ID NO: 68) | |
| SLC12A2- | GGTCAAGCTGGAATA | TGCCTCACACTTCAG | 189 |
| NRG2 | GGTCTATCAG | CGATT | |
| | (SEQ ID NO: 39) | (SEQ ID NO: 70) | |

### Example

[0250] This example describes the identification of novel fusion transcripts in gastric tissues.

[0251] In order to identify novel fusion transcripts potentially serving as targets for treatment, the gastric tissues taken from 51 patients with gastric cancer (5 with moderately differentiated GC, 3 with special-type mucinous GC, and 43 with undifferentiated GC) were subjected to whole-transcriptome sequencing (RNA sequencing; refer to Meyerson, M., et al., Nat. Rev. Genet., 2010, 11, 685-696).

[0252] After overlapping clones generated by PCR were eliminated, at least 8.0×10⁷ paired nucleotide sequences were obtained for each case. These sequences were compared to existing gene databases; as a result, a candidate for fusion gene between the ATG3 gene and the EPHB1 gene was detected in one case (special-type mucinous GC patient), a candidate for fusion gene between the TNIK gene and the RNF123 gene was detected in one case (undifferentiated GC patient), and a candidate for fusion gene between the SLC12A2 gene and the NRG2 gene was detected in one case (moderately differentiated GC patient). The structures of these fusion genes are shown in Table 2 and FIGS. 1 to 4.

TABLE 2

| | Location | Location | Causative |
|---|---|---|---|
| | of gene | of gene | chromosomal |
| Fusion gene | toward 5′-end | toward 3′-end | aberration |
| ATG3-EPHB1 | 3q13.2 | 3q21-q23 | Chromosomal |
| | | | inversion (inv3) |
| TNIK-RNF123 | 3q26.31 | 3p24.3 | Chromosomal |
| | | | inversion (inv3) |
| SLC12A2-NRG2 | 5q23.3 | 5q23-q33 | Chromosomal |
| | | | inversion (inv5) |

[0253] Then, RT-PCR was performed using the primers shown in Table 1 on the specimens of the cases in which fusion genes were detected, and the obtained PCR products were subjected to sequence analysis to verify the expression of the above-mentioned three types of fusion genes. The sequences of the amplified PCR products are as follows. ATG3-EPHB1 (Uppercase and lowercase letters represent an ATG3 gene-derived sequence and an EPHB1 gene-derived sequence, respectively):

(SEQ ID NO: 71)
CACTGGAAGTGGCTGAGTACCTGACCCCGGTCCTCAAGGAATCAAAGTTT
AAGGAAACAGGTGTAATTACCCCAGAAGAGgaacacaatgagttcaactc
ctccatggccaggagtcagaccaacacagcaaggattgatgggctgcggc

TNIK-RNF123 (Uppercase and lowercase letters represent a TNIK gene-derived sequence and an RNF123 gene-derived sequence, respectively):

(SEQ ID NO: 72)
GGTCAGTGGAAACAGGACATTTGGATGGAGTATTTATGCATAAGCGAGCT
CAAAGGTTAAAGTTTCTATGTGAAAGAAATGATAAGgtgattggacacag
caactttggcaccatccgctctaccacatgcgtgtacaaagggaaatggc
tctacgaggtcctcatctcctcccaggggctcatgcagatcggctggtgc
accatcagctgccgcttcaaccaggaggagggggttggagatacacacaa
ctcctatgcctatgatggcaaccgcgtgcgcaagtggaatgtgaccacaa
cgaattatggcaaggcgt

SLC12A2-NRG2 fusion gene (Uppercase and lowercase letters represent an SLC12A2 gene-derived sequence and an NRG2 gene-derived sequence, respectively):

(SEQ ID NO: 73)
GGTCAAGCTGGAATAGGTCTATCAGTCCTTGTAATAATGATGGCCACTGT
TGTGACAACTATCACAGGATTGTCTACTTCAGCAATAGCAACTAATGGAT
TTGTAAGAGGAGccacccggcccaagttgaagaagatgaagagccagacg
ggacaggtgggtgagaagcaatcgctgaagtgtgaggca

[0254] ATG3-EPHB1 is a fusion gene generated by chromosomal inversion (inv3), in which exon 2 of the ATG3 gene is directly bound to exon 7 of the EPHB1 gene without inconsistency in the reading frames of these genes. The entire coding region of the ATG3-EPHB1 fusion gene was cloned and sequenced (SEQ ID NO: 1).

[0255] TNIK-RNF123 is a fusion gene generated by chromosomal inversion (inv3), in which exon 32 of the TNIK gene is directly bound to exon 6 of the RNF123 gene without inconsistency in the reading frames of these genes.

[0256] SLC12A2-NRG2 is a fusion gene generated by chromosomal inversion (inv5), in which exon 4 of the SLC12A2 gene is directly bound to exon 2 of the NRG2 gene without inconsistency in the reading frames of these genes.

[0257] The above results demonstrated that the gene fusions found in Example can be detected by verifying the presence or absence of the amplification of specific bands by RT-PCR and sequencing the nucleotide sequences of the PCR products.

[0258] Further, RT-PCR was performed on normal gastric mucosal tissues using the primers shown in Table 1, and as a result, no amplification of a specific band was observed, which demonstrated that none of the above-mentioned three types of fusion genes was expressed. The results indicated that the above-mentioned three types of gene fusions were specific for cancer cells.

[0259] Furthermore, none of KRAS mutations (mutations at the 12th, 13rd or 61st amino acid residue from the N-terminus), NRAS mutations (mutations at the 12th, 13rd or 61st amino acid residue from the N-terminus), and BRAF mutations (mutations at the 600th amino acid residue from the N-terminus and its neighbors), which were known as causative gene mutations for gastric cancer, was detected in any of the three cases in which any of the above-mentioned three types of fusion genes was detected. Therefore, it was suggested that these fusion genes are highly likely to be responsible mutations for gastric cancer.

### INDUSTRIAL APPLICABILITY

[0260] The present invention makes it possible to detect gene fusions newly discovered as responsible mutations for cancer; to identify patients with cancer or subjects with a risk of cancer, in whom substances suppressing the expression and/or activity of polypeptides encoded by fusion polynucleotides produced by said gene fusions show a therapeutic effect; and to provide suitable treatment (personalized medicine) for such cancer patients.

### Sequence Listing Free Text

[0261] SEQ ID NO: 1: ATG3-EPHB1 fusion polynucleotide
SEQ ID NO: 2: ATG3-EPHB1 fusion polypeptide
SEQ ID NOs: 3, 5, 7, 9, 11, 13, 15 and 17: TNIK-RNF123 fusion polynucleotides
SEQ ID NOs: 4, 6, 8, 10, 12, 14, 16 and 18: TNIK-RNF123 fusion polypeptides
SEQ ID NOs: 19, 21, 23, 25 and 27: SLC12A2-NRG2 fusion polynucleotides
SEQ ID NOs: 20, 22, 24, 26 and 28: SLC12A2-NRG2 fusion polypeptides
SEQ ID NO: 29: ATG3 cDNA
SEQ ID NO: 30: ATG3 polypeptide
SEQ ID NO: 31: EPHB1 cDNA
SEQ ID NO: 32: EPHB1 polypeptide
SEQ ID NOs: 33, 35, 37, 39, 41, 43, 45 and 47: TNIK cDNAs
SEQ ID NOs: 34, 36, 38, 40, 42, 44, 46 and 48: TNIK polypeptides
SEQ ID NO: 49: RNF123 cDNA
SEQ ID NO: 50: RNF123 polypeptide
SEQ ID NOs: 51 and 53: SLC12A2 cDNAs
SEQ ID NOs: 52 and 54: SLC12A2 polypeptides
SEQ ID NOs: 55, 57, 59, 61 and 63: NRG2 cDNAs
SEQ ID NOs: 56, 58, 60, 62 and 64: NRG2 polypeptides
SEQ ID NO: 65: ATG3 sense primer
SEQ ID NO: 66: EPHB1 primer
SEQ ID NO: 67: TNIK sense primer
SEQ ID NO: 68: RNF123 primer
SEQ ID NO: 69: SLC12A2 sense primer
SEQ ID NO: 70: NRG2 primer
SEQ ID NO: 71: Partial sequence of ATG3-EPHB1 fusion polynucleotide
SEQ ID NO: 72: Partial sequence of TNIK-RNF123 fusion polynucleotide
SEQ ID NO: 73: Partial sequence of SLC12A2-NRG2 fusion polynucleotide

1. A method for detecting a gene fusion serving as a responsible mutation (driver mutation) for cancer, the method comprising the step of detecting a fusion polynucleotide of any one of (a) to (c) below, or a polypeptide encoded thereby, in an isolated sample from a subject:
(a) an ATG3-EPHB1 fusion polynucleotide which encodes a polypeptide comprising the kinase domain of EPHB1 and having kinase activity;
(b) a TNIK-RNF123 fusion polynucleotide which encodes a polypeptide comprising the kinase domain of TNIK and the SPRY domain and RING finger domain of RNF123, and having kinase activity; and
(c) an SLC12A2-NRG2 fusion polynucleotide which encodes a polypeptide comprising the AA_permease_N super family domain of SLC12A2 and the neuregulin family conserved region of NRG2, and having intracellular signaling-enhancing activity.

2. The method according to claim 1, wherein the fusion polynucleotide is any one of (a) to (c) below:
(a) an ATG3-EPHB1 fusion polynucleotide encoding the polypeptide mentioned below:
(i) a polypeptide consisting of the amino acid sequence of SEQ ID NO: 2,
(ii) a polypeptide consisting of an amino acid sequence derived from the amino acid sequence of SEQ ID NO: 2 by deletion, substitution or addition of one or more amino acids, and the polypeptide having kinase activity, or
(iii) a polypeptide consisting of an amino acid sequence having a sequence identity of at least 80% to the amino acid sequence of SEQ ID NO: 2, and the polypeptide having kinase activity;
(b) a TNIK-RNF123 fusion polynucleotide encoding the polypeptide mentioned below:
(i) a polypeptide consisting of the amino acid sequence of SEQ ID NO: 4, 6, 8, 10, 12, 14, 16 or 18,
(ii) a polypeptide consisting of an amino acid sequence derived from the amino acid sequence of SEQ ID NO: 4, 6, 8, 10, 12, 14, 16 or 18 by deletion, substitution or addition of one or more amino acids, and the polypeptide having kinase activity, or
(iii) a polypeptide consisting of an amino acid sequence having a sequence identity of at least 80% to the amino acid sequence of SEQ ID NO: 4, 6, 8, 10, 12, 14, 16 or 18, and the polypeptide having kinase activity; and
(c) an SLC12A2-NRG2 fusion polynucleotide encoding the polypeptide mentioned below:
(i) a polypeptide consisting of the amino acid sequence of SEQ ID NO: 20, 22, 24, 26 or 28,
(ii) a polypeptide consisting of an amino acid sequence derived from the amino acid sequence of SEQ ID NO: 20, 22, 24, 26 or 28 by deletion, substitution or addition of one or more amino acids, and the polypeptide having intracellular signaling-enhancing activity, or
(iii) a polypeptide consisting of an amino acid sequence having a sequence identity of at least 80% to the amino acid sequence of SEQ ID NO: 20, 22, 24, 26 or 28, and the polypeptide having intracellular signaling-enhancing activity.

3. The method according to claim 1, wherein the fusion polynucleotide is any one of (a) to (c) below:
(a) (i) a polynucleotide consisting of the nucleotide sequence of SEQ ID NO: 1,
(ii) a polynucleotide that hybridizes under stringent conditions with a polynucleotide consisting of a nucleotide sequence complementary to the polynucleotide consisting of the nucleotide sequence of SEQ ID NO: 1, and which encodes a polypeptide having kinase activity,
(iii) a polynucleotide that consists of a nucleotide sequence derived from the nucleotide sequence of SEQ ID NO: 1 by deletion, substitution or addition of one or more nucleotides, and which encodes a polypeptide having kinase activity, or
(iv) a polynucleotide that has a sequence identity of at least 80% to the polynucleotide consisting of the nucleotide sequence of SEQ ID NO: 1, and which encodes a polypeptide having kinase activity;
(b) (i) a polynucleotide consisting of the nucleotide sequence of SEQ ID NO: 3, 5, 7, 9, 11, 13, 15 or 17,
(ii) a polynucleotide that hybridizes under stringent conditions with a polynucleotide consisting of a nucleotide sequence complementary to the polynucleotide consisting of the nucleotide sequence of SEQ ID NO: 3, 5, 7, 9, 11, 13, 15 or 17, and which encodes a polypeptide having kinase activity,
(iii) a polynucleotide that consists of a nucleotide sequence derived from the nucleotide sequence of SEQ ID NO: 3, 5, 7, 9, 11, 13, 15 or 17 by deletion, substitution or addition of one or more nucleotides, and which encodes a polypeptide having kinase activity, or
(iv) a polynucleotide that has a sequence identity of at least 80% to the polynucleotide consisting of the nucleotide sequence of SEQ ID NO: 3, 5, 7, 9, 11, 13, 15 or 17, and which encodes a polypeptide having kinase activity; and
(c) (i) a polynucleotide consisting of the nucleotide sequence of SEQ ID NO: 19, 21, 23, 25 or 27,
(ii) a polynucleotide that hybridizes under stringent conditions with a polynucleotide consisting of a nucleotide sequence complementary to the polynucleotide consisting of the nucleotide sequence of SEQ ID NO: 19, 21, 23, 25 or 27, and which encodes a polypeptide having intracellular signaling-enhancing activity,
(iii) a polynucleotide that consists of a nucleotide sequence derived from the nucleotide sequence of SEQ ID NO: 19, 21, 23, 25 or 27 by deletion, substitution or addition of one or more nucleotides, and which encodes a polypeptide having intracellular signaling-enhancing activity, or
(iv) a polynucleotide that has a sequence identity of at least 80% to the polynucleotide consisting of the nucleotide sequence of SEQ ID NO: 19, 21, 23, 25 or 27, and which encodes a polypeptide having intracellular signaling-enhancing activity.

4. The method according to claim 1, wherein the cancer is gastric cancer.

5. A method for identifying a patient with cancer or a subject with a risk of cancer, in whom a substance suppressing the expression and/or activity of a polypeptide encoded by a fusion polynucleotide produced by a gene fusion serving as a responsible mutation (driver mutation) for cancer shows a therapeutic effect, the method comprising the steps of:
(1) detecting a fusion polynucleotide of any one of (a) to (c) below, or a polypeptide encoded thereby, in an isolated sample from the subject:
(a) an ATG3-EPHB1 fusion polynucleotide which encodes a polypeptide comprising the kinase domain of EPHB1 and having kinase activity,
(b) a TNIK-RNF123 fusion polynucleotide which encodes a polypeptide comprising the kinase domain of TNIK and the SPRY domain and RING finger domain of RNF123, and having kinase activity, and
(c) an SLC2A2-NRG2 fusion polynucleotide which encodes a polypeptide comprising the AA_permease_N super family domain of SLC12A2 and the neuregulin family conserved region of NRG2, and having intracellular signaling-enhancing activity; and
(2) determining that the substance suppressing the expression and/or activity of the polypeptide shows a therapeutic effect in the subject, in the case where the fusion polynucleotide of any one of (a) to (c) or the polypeptide encoded thereby is detected.

6. A kit for detecting a gene fusion serving as a responsible mutation (driver mutation) for cancer, the kit comprising any or a combination of (A) to (C) below:
(A) a polynucleotide that serves as a probe designed to specifically recognize an ATG3-EPHB1 fusion polynucleotide, a TNIK-RNF123 fusion polynucleotide, or an SLC12A2-NRG2 fusion polynucleotide;
(B) polynucleotides that serve as a pair of primers designed to enable specific amplification of an ATG3-EPHB1 fusion polynucleotide, a TNIK-RNF123 fusion polynucleotide, or an SLC12A2-NRG2 fusion polynucleotide; and
(C) an antibody that specifically recognizes an ATG3-EPHB1 fusion polypeptide, a TNIK-RNF123 fusion polypeptide, or an SLC12A2-NRG2 fusion polypeptide.

7. An isolated ATG3-EPHB1 fusion polypeptide or a fragment thereof, which comprises the kinase domain of EPHB1 and has kinase activity.

8. An isolated TNIK-RNF123 fusion polypeptide or a fragment thereof, which comprises the kinase domain of TNIK and the SPRY domain and RING finger domain of RNF123, and has kinase activity.

9. An isolated SLC12A2-NRG2 fusion polypeptide or a fragment thereof, which comprises the AA_permease_N super family domain of SLC12A2 and the neuregulin family conserved region of NRG2, and has intracellular signaling-enhancing activity.

10. A polynucleotide encoding the fusion polypeptide or the fragment thereof according to claim 7.

11. A method for treating cancer positive for ATG3-EPHB1, TNIK-RNF123 or SLC12A2-NRG2 gene fusion, comprising administering, to a patient in need thereof, an effective amount of a substance suppressing the expression and/or activity of: an ATG3-EPHB1 fusion polypeptide comprising the kinase domain of EPHB1 and having kinase activity; a TNIK-RNF123 fusion polypeptide comprising the kinase domain of TNIK and the SPRY domain and RING finger domain of RNF123 and having kinase activity: or an SLC12A2-NRG2 fusion polypeptide comprising the AA_permease_N super family domain of SLC12A2 and the neuregulin family conserved region of NRG2, and having intracellular signaling-enhancing activity.

12. (canceled)

13. The method according to claim 11, wherein the cancer is gastric cancer.

14. A method for screening a cancer therapeutic agent, the method comprising the steps of:
(1) bringing a test substance into contact with a cell that expresses: an ATG3-EPHB1 fusion polypeptide comprising the kinase domain of EPHB1 and having kinase activity; a TNIK-RNF 123 fusion polypeptide comprising the kinase domain of TNIK and the SPRY domain and RING finger domain of RNF123 and having kinase activity; or an SLC12A2-NRG2 fusion polypeptide comprising the AA_permease_N super family domain of SLC12A2 and the neuregulin family conserved region of NRG2, and having intracellular signaling-enhancing activity;
(2) determining whether the expression and/or activity of any of said fusion polypeptides is suppressed or not; and
(3) selecting the substance determined to suppress the expression and/or activity of any of said fusion polypeptides, as a cancer therapeutic agent.

15. A polynucleotide encoding the fusion polypeptide or the fragment thereof according to claim 8.

16. A polynucleotide encoding the fusion polypeptide or the fragment thereof according to claim 9.

The application's sequence listing, which the Patent Office published only in electronic form, follows.

SEQUENCE LISTING (73 sequences)

SEQ ID NO: 1 - DNA, 1647 bp, Homo sapiens
  CDS (1)..(1647)
atgcagaatgtgattaatactgtgaagggaaaggcactggaagtggctgagtacctgaccccggtcctcaaggaatcaaagtttaaggaaacaggtgtaattaccccagaagaggaacacaatgagttcaactcctccatggccaggagtcagaccaacacagcaaggattgatgggctgcggcctggcatggtatatgtggtacaggtgcgtgcccgcactgttgctggctacggcaagttcagtggcaagatgtgcttccagactctgactgacgatgattacaagtcagagctgagggagcagctgcccctgattgctggctcggcagcggccggggtcgtgttcgttgtgtccttggtggccatctctatcgtctgtagcaggaaacgggcttatagcaaagaggctgtgtacagcgataagctccagcattacagcacaggccgaggctccccagggatgaagatctacattgaccccttcacttacgaggatcccaacgaagctgtccgggagtttgccaaggagattgatgtatcttttgtgaaaattgaagaggtcatcggagcaggggagtttggagaagtgtacaaggggcgtttgaaactgccaggcaagagggaaatctacgtggccatcaagaccctgaaggcagggtactcggagaagcagcgtcgggactttctgagtgaggcgagcatcatgggccagttcgaccatcctaacatcattcgcctggagggtgtggtcaccaagagtcggcctgtcatgatcatcacagagttcatggagaatggtgcattggattctttcctcaggcaaaatgacgggcagttcaccgtgatccagcttgtgggtatgctcaggggcatcgctgctggcatgaagtacctggctgagatgaattatgtgcatcgggacctggctgctaggaacattctggtcaacagtaacctggtgtgcaaggtgtccgactttggcctctcccgctacctccaggatgacacctcagatcccacctacaccagctccttgggagggaagatccctgtgagatggacagctccagaggccatcgcctaccgcaagttcacttcagccagcgacgtttggagctatgggatcgtcatgtgggaagtcatgtcatttggagagagaccctattgggatatgtccaaccaagatgtcatcaatgccatcgagcaggactaccggctgcccccacccatggactgtccagctgctctacaccagctcatgctggactgttggcagaaggaccggaacagccggccccggtttgcggagattgtcaacaccctagataagatgatccggaacccggcaagtctcaagactgtggcaaccatcaccgccgtgccttcccagcccctgctcgaccgctccatcccagacttcacggcctttaccaccgtggatgactggctcagcgccatcaaaatggtccagtacagggacagcttcctcactgctggcttcacctccctccagctggtcacccagatgacatcagaagacctcctgagaataggcatcaccttggcaggccatcagaagaagatcctgaacagcattcattctatgagggtccagataagtcagtcaccaacggcaatggcatga

SEQ ID NO: 2 - protein, 548 aa, Homo sapiens
MQNVINTVKGKALEVAEYLTPVLKESKFKETGVITPEEEHNEFNSSMARSQTNTARIDGLRPGMVYVVQVRARTVAGYGKFSGKMCFQTLTDDDYKSELREQLPLIAGSAAAGVVFVVSLVAISIVCSRKRAYSKEAVYSDKLQHYSTGRGSPGMKIYIDPFTYEDPNEAVREFAKEIDVSFVKIEEVIGAGEFGEVYKGRLKLPGKREIYVAIKTLKAGYSEKQRRDFLSEASIMGQFDHPNIIRLEGVVTKSRPVMIITEFMENGALDSFLRQNDGQFTVIQLVGMLRGIAAGMKYLAEMNYVHRDLAARNILVNSNLVCKVSDFGLSRYLQDDTSDPTYTSSLGGKIPVRWTAPEAIAYRKFTSASDVWSYGIVMWEVMSFGERPYWDMSNQDVINAIEQDYRLPPPMDCPAALHQLMLDCWQKDRNSRPRFAEIVNTLDKMIRNPASLKTVATITAVPSQPLLDRSIPDFTAFTTVDDWLSAIKMVQYRDSFLTAGFTSLQLVTQMTSEDLLRIGITLAGHQKKILNSIHSMRVQISQSPTAMA

SEQ ID NO: 3 - DNA, 7602 bp, Homo sapiens
  CDS (1)..(7602)
atggcgagcgactccccggctcgaagcctggatgaaatagatctctcggctctgagggaccccgcagggatctttgaattggtggaacttgttggaaatggaacatacgggcaagtttataagggtcgtcatgtcaaaacgggccagcttgcagccatcaaggttatggatgtcacaggggatgaagaggaagaaatcaaacaagaaattaacatgttgaagaaatattctcatcaccggaatattgctacatactatggtgcttttatcaaaaagaacccaccaggcatggatgaccaactttggttggtgatggagttttgtggtgctggctctgtcaccgacctgatcaagaacacaaaaggtaacacgttgaaagaggagtggattgcatacatctgcagggaaatcttacgggggctgagtcacctgcaccagcataaagtgattcatcgagatattaaagggcaaaatgtcttgctgactgaaaatgcagaagttaaactagtggactttggagtcagtgctcagcttgatcgaacagtgggcaggaggaatactttcattggaactccctactggatggcaccagaagttattgcctgtgatgaaaacccagatgccacatatgatttcaagagtgacttgtggtctttgggtatcaccgccattgaaatggcagaaggtgctccccctctctgtgacatgcaccccatgagagctctcttcctcatcccccggaacccagcgcctcggctgaagtctaagaagtggtcaaaaaaattccagtcatttattgagagctgcttggtaaagaatcacagccagcgaccagcaacagaacaattgatgaagcatccatttatacgagaccaacctaatgagcgacaggtccgcattcaactcaaggaccatattgatagaacaaagaagaagcgaggagaaaaagatgagacagagtatgagtacagtggaagtgaggaagaagaggaggagaatgactcaggagagcccagctccatcctgaatctgccaggggagtcgacgctgcggagggactttctgaggctgcagctggccaacaaggagcgttctgaggccctacggaggcagcagctggagcagcagcagcgggagaatgaggagcacaagcggcagctgctggccgagcgtcagaagcgcatcgaggagcagaaagagcagaggcggcggctggaggagcaacaaaggcgagagaaggagctgcggaagcagcaggagagggagcagcgccggcactatgaggagcagatgcgccgggaggaggagaggaggcgtgcggagcatgaacaggaatacatcaggcgacagttagaggaggagcagagacagttagagatcttgcagcagcagctactgcatgaacaagctctacttctggaatataagcgcaaacaattggaagaacagagacaagcagaaagactgcagaggcagctaaagcaagaaagagactacttagtttcccttcagcatcagcggcaggagcagaggcctgtggagaagaagccactgtaccattacaaagaaggaatgagtcctagtgagaagccagcatgggccaaggaggtagaagaacggtcaaggctcaaccggcaaagttcccctgccatgcctcacaaggttgccaacaggatatctgaccccaacctgcccccaaggtcggagtccttcagcattagtggagttcagcctgctcgaacaccccccatgctcagaccagtcgatccccagatcccacatctggtagctgtaaaatcccagggacctgccttgaccgcctcccagtcagtgcacgagcagcccacaaagggcctctctgggtttcaggaggctctgaacgtgacctcccaccgcgtggagatgccacgccagaactcagatcccacctcggaaaatcctcctctccccactcgcattgaaaagtttgaccgaagctcttggttacgacaggaagaagacattccaccaaaggtgcctcaaagaacaacttctatatccccagcattagccagaaagaattctcctgggaatggtagtgctctgggacccagactaggatctcaacccatcagagcaagcaaccctgatctccggagaactgagcccatcttggagagccccttgcagaggaccagcagtggcagttcctccagctccagcacccctagctcccagcccagctcccaaggaggctcccagcctggatcacaagcaggatccagtgaacgcaccagagttcgagccaacagtaagtcagaaggatcacctgtgctcccccatgagcctgccaaggtgaaaccagaagaatccagggacattacccggcccagtcgaccagctagctacaaaaaagctatagatgaggatctgacggcattagccaaagaactaagagaactccggattgaagaaacaaaccgcccaatgaagaaggtgactgattactcctcctccagtgaggagtcagaaagtagcgaggaagaggaggaagatggagagagcgagacccatgatgggacagtggctgtcagcgacatacccagactgataccaacaggagctccaggcagcaacgagcagtacaatgtgggaatggtggggacgcatgggctggagacctctcatgcggacagtttcagcggcagtatttcaagagaaggaaccttgatgattagagagacgtctggagagaagaagcgatctggccacagtgacagcaatggctttgctggccacatcaacctccctgacctggtgcagcagagccattctccagctggaaccccgactgagggactggggcgcgtctcaacccattcccaggagatggactctgggactgaatatggcatggggagcagcaccaaagcctccttcaccccctttgtggaccccagagtataccagacgtctcccactgatgaagatgaagaggatgaggaatcatcagccgcagctctgtttactagcgaacttcttaggcaagaacaggccaaactcaatgaagcaagaaagatttcggtggtaaatgtaaacccaaccaacattcggcctcatagcgacacaccagaaatcagaaaatacaagaaacgattcaactcagaaatactttgtgcagctctgtggggtgtaaaccttctggtggggactgaaaatggcctgatgcttttggaccgaagtgggcaaggcaaagtctataatctgatcaaccggaggcgatttcagcagatggatgtgctagagggactgaatgtccttgtgacaatttcaggaaagaagaataagctacgagtttactatctttcatggttaagaaacagaatactacataatgacccagaagtagaaaagaaacaaggctggatcactgttggggacttggaaggctgtatacattataaagttgttaaatatgaaaggatcaaatttttggtgattgccttaaagaatgctgtggaaatatatgcttgggctcctaaaccgtatcataaattcatggcatttaagtcttttgcagatctccagcacaagcctctgctagttgatctcacggtagaagaaggtcaaagattaaaggttatttttggttcacacactggtttccatgtaattgatgttgattcaggaaactcttatgatatctacataccatctcatattcagggcaatatcactcctcatgctattgtcatcttgcctaaaacagatggaatggaaatgcttgtttgctatgaggatgagggggtgtatgtaaacacctatggccggataactaaggatgtggtgctccaatggggagaaatgcccacgtctgtggcctacattcattccaatcagataatgggctggggcgagaaagctattgagatccggtcagtggaaacaggacatttggatggagtatttatgcataagcgagctcaaaggttaaagtttctatgtgaaagaaatgataaggtgattggacacagcaactttggcaccatccgctctaccacatgcgtgtacaaagggaaatggctctacgaggtcctcatctcctcccaggggctcatgcagatcggctggtgcaccatcagctgccgcttcaaccaggaggagggggttggagatacacacaactcctatgcctatgatggcaaccgcgtgcgcaagtggaatgtgaccacaacgaattatggcaaggcgtgggcagcgggggacatcgtgagctgcctgattgacctggatgatggcactctgtccttctgcctgaacggtgtatcactgggcactgcctttgagaacctgtccaggggcctgggtatggcctacttcccagccatcagcctctctttcaaggagtccgtggccttcaactttggcagccgtcctctgcgctacccagtggcaggctaccggcccctgcaggacccaccgagtgctgacctggtgcgggcacagaggttgctgggctgcttccgggcagtgctgagtgtggagctggaccctgtggaggggcggctgttggacaaggagagctccaagtggcggttgcggggccagcccaccgtcctcctcacactggcccacatcttccatcactttgcaccgcttctgcgcaaggtgtatctggtggaggctgtgctcatgagcttcttgctgggcatcgtggagaagggcacacccacacaggcacagtccgtggtgcaccaggtcctggacctcttgtggctcttcatggaggactacgaggtacaagattgcctcaagcagttgatgatgtctctgcttcggctgtaccgattctcacccattgtcccagacctgggcctacagatccattacctgcggctcactatcgccatcctgaggcatgagaagtcccgcaagtttctgcttagcaatgtcctcttcgacgtgctccgctccgtcgtcttcttttacatcaagagccccctgcgtgtggaggaggccggcctgcaggagctcattcccaccacctggtggccccactgctccagtagggagggcaaagagagcacggagatgaaggaggagaccgcagaggagcggctgcggcggcgagcctacgaacggggctgtcagcggctcaggaagcgcatcgaagtggtggaagaactacaggtccagatcctgaagctgctgctggacaataaagatgacaatgggggtgaagcttctaggtatatcttcctgaccaagtttcgcaagtttctgcaggagaacgccagtggccgggggaacatgcccatgctctgcccccctgagtacatggtctgcttcttacaccggctgatctctgccctgcgctactattgggatgaatacaaggcttccaatcctcatgcttccttcagtgaggaggcctacatcccgccccaggtcttctataatggcaaggtggactactttgacctgcagcgcctggggggcctcctctcgcacctgcggaagaccctcaaagatgaccttgcttccaaagccaacattgtgatcgacccactggagctccagtcaaccgccatggatgacctagatgaggatgaggagccagccccagctatggcccagcgccccatgcaggccctggctgttggggggccactgcccctgccccggcccggctggctcagttctccaactttgggccgagccaaccgcttcctcagcacagcggctgtgagcctcatgaccccacggcggcctctgagcacctcggagaaagtgaaggtccgcacgctgagcgtggagcagaggacccgtgaggacattgaaggcagccactggaatgagggcttgctgctggggcggccccccgaggagcctgagcagcccctcaccgagaactcgctgctggaagtcctggatggggcggtcatgatgtacaacctcagcgtacaccagcagctgggcaagatggtgggtgtctccgatgatgtcaatgaatacgctatggctctgagggacacagaggacaagctccgccggtgccccaagaggaggaaggacatccttgcagagttgaccaagagccagaaggttttctcagaaaagctggaccacctgagccgccgtcttgcctgggtccatgccactgtctactcccaggagaagatgctggacatctactggctgctgcgcgtctgcctgcggaccattgagcacggtgatcgcacagggtctctctttgccttcatgcccgagttctacctgagcgtggccatcaacagctacagtgctctcaagaattactttggtcccgtgcacagcatggaggagctcccaggctatgaagagaccctgacccgcctggctgccattctcgccaaacactttgccgacgcacgcattgtgggcactgacatccgagactcactgatgcaggccctggccagctacgtgtgctacccacactccctgcgggctgtggagcgaatccccgaggagcagcgtatcgccatggtgaggaacctcctggcgccctatgagcagcggccctgggcccagaccaactggatcctggtgcggctctggaggggctgtggcttcgggtaccgctatacacggctgccacatctgctgaaaaccaaacttgaggacgccaatttgcccagcctccagaagccctgcccttccaccctgctgcagcagcacatggcggacctcctacagcagggtcctgatgtggcacccagcttcctcaacagcgtcctcaatcagctcaactgggccttctctgaattcattggcatgatccaagagatccagcaggctgctgagcgcctggagcggaactttgtggacagccggcagctcaaggtatgtgccacctgctttgacctctcggtcagcctgctgcgtgtcttggagatgactatcacactggtgcctgagatattccttgactggacccggcctacctctgagatgctgctgcggcgtcttgcacagctgctaaaccaggtgctgaaccgggtgacagctgagaggaacctgtttgatcgtgtggtcaccctacggctgcctggcctagagagcgtggaccactatcccattctggtggcagtgacgggcatcctggtgcagctcctggtgcgtggcccagcctcagagagagagcaagccacatcagtgctcctggcagatccctgcttccagctacgctcaatatgctatctcctgggacagccagagcccccagcacctggcactgctctgccagcccctgaccggaagcgcttctccctgcagagctatgcggattatatcagtgccgatgagctggcccaagtggaacagatgctggcgcacctgacctctgcatctgcccaggcagcagctgcctccctgcccaccagtgaggaggacctctgccccatctgctatgcccaccccatctctgctgtgttccagccctgtggccacaagtcctgcaaagcctgtatcaaccagcacctgatgaacaacaaggactgcttcttctgcaaaaccaccatcgtgtctgtagaggactgggagaagggagccaatacgagtactacctcctcagctgcctag

SEQ ID NO: 4 - protein, 2533 aa, Homo sapiens
MASDSPARSLDEIDLSALRDPAGIFELVELVGNGTYGQVYKGRHVKTGQLAAIKVMDVTGDEEEEIKQEINMLKKYSHHRNIATYYGAFIKKNPPGMDDQLWLVMEFCGAGSVTDLIKNTKGNTLKEEWIAYICREILRGLSHLHQHKVIHRDIKGQNVLLTENAEVKLVDFGVSAQLDRTVGRRNTFIGTPYWMAPEVIACDENPDATYDFKSDLWSLGITAIEMAEGAPPLCDMHPMRALFLIPRNPAPRLKSKKWSKKFQSFIESCLVKNHSQRPATEQLMKHPFIRDQPNERQVRIQLKDHIDRTKKKRGEKDETEYEYSGSEEEEEENDSGEPSSILNLPGESTLRRDFLRLQLANKERSEALRRQQLEQQQRENEEHKRQLLAERQKRIEEQKEQRRRLEEQQRREKELRKQQEREQRRHYEEQMRREEERRRAEHEQEYIRRQLEEEQRQLEILQQQLLHEQALLLEYKRKQLEEQRQAERLQRQLKQERDYLVSLQHQRQEQRPVEKKPLYHYKEGMSPSEKPAWAKEVEERSRLNRQSSPAMPHKVANRISDPNLPPRSESFSISGVQPARTPPMLRPVDPQIPHLVAVKSQGPALTASQSVHEQPTKGLSGFQEALNVTSHRVEMPRQNSDPTSENPPLPTRIEKFDRSSWLRQEEDIPPKVPQRTTSISPALARKNSPGNGSALGPRLGSQPIRASNPDLRRTEPILESPLQRTSSGSSSSSSTPSSQPSSQGGSQPGSQAGSSERTRVRANSKSEGSPVLPHEPAKVKPEESRDITRPSRPASYKKAIDEDLTALAKELRELRIEETNRPMKKVTDYSSSSEESESSEEEEEDGESETHDGTVAVSDIPRLIPTGAPGSNEQYNVGMVGTHGLETSHADSFSGSISREGTLMIRETSGEKKRSGHSDSNGFAGHINLPDLVQQSHSPAGTPTEGLGRVSTHSQEMDSGTEYGMGSSTKASFTPFVDPRVYQTSPTDEDEEDEESSAAALFTSELLRQEQAKLNEARKISVVNVNPTNIRPHSDTPEIRKYKKRFNSEILCAALWGVNLLVGTENGLMLLDRSGQGKVYNLINRRRFQQMDVLEGLNVLVTISGKKNKLRVYYLSWLRNRILHNDPEVEKKQGWITVGDLEGCIHYKVVKYERIKFLVIALKNAVEIYAWAPKPYHKFMAFKSFADLQHKPLLVDLTVEEGQRLKVIFGSHTGFHVIDVDSGNSYDIYIPSHIQGNITPHAIVILPKTDGMEMLVCYEDEGVYVNTYGRITKDVVLQWGEMPTSVAYIHSNQIMGWGEKAIEIRSVETGHLDGVFMHKRAQRLKFLCERNDKVIGHSNFGTIRSTTCVYKGKWLYEVLISSQGLMQIGWCTISCRFNQEEGVGDTHNSYAYDGNRVRKWNVTTTNYGKAWAAGDIVSCLIDLDDGTLSFCLNGVSLGTAFENLSRGLGMAYFPAISLSFKESVAFNFGSRPLRYPVAGYRPLQDPPSADLVRAQRLLGCFRAVLSVELDPVEGRLLDKESSKWRLRGQPTVLLTLAHIFHHFAPLLRKVYLVEAVLMSFLLGIVEKGTPTQAQSVVHQVLDLLWLFMEDYEVQDCLKQLMMSLLRLYRFSPIVPDLGLQIHYLRLTIAILRHEKSRKFLLSNVLFDVLRSVVFFYIKSPLRVEEAGLQELIPTTWWPHCSSREGKESTEMKEETAEERLRRRAYERGCQRLRKRIEVVEELQVQILKLLLDNKDDNGGEASRYIFLTKFRKFLQENASGRGNMPMLCPPEYMVCFLHRLISALRYYWDEYKASNPHASFSEEAYIPPQVFYNGKVDYFDLQRLGGLLSHLRKTLKDDLASKANIVIDPLELQSTAMDDLDEDEEPAPAMAQRPMQALAVGGPLPLPRPGWLSSPTLGRANRFLSTAAVSLMTPRRPLSTSEKVKVRTLSVEQRTREDIEGSHWNEGLLLGRPPEEPEQPLTENSLLEVLDGAVMMYNLSVHQQLGKMVGVSDDVNEYAMALRDTEDKLRRCPKRRKDILAELTKSQKVFSEKLDHLSRRLAWVHATVYSQEKMLDIYWLLRVCLRTIEHGDRTGSLFAFMPEFYLSVAINSYSALKNYFGPVHSMEELPGYEETLTRLAAILAKHFADARIVGTDIRDSLMQALASYVCYPHSLRAVERIPEEQRIAMVRNLLAPYEQRPWAQTNWILVRLWRGCGFGYRYTRLPHLLKTKLEDANLPSLQKPCPSTLLQQHMADLLQQGPDVAPSFLNSVLNQLNWAFSEFIGMIQEIQQAAERLERNFVDSRQLKVCATCFDLSVSLLRVLEMTITLVPEIFLDWTRPTSEMLLRRLAQLLNQVLNRVTAERNLFDRVVTLRLPGLESVDHYPILVAVTGILVQLLVRGPASEREQATSVLLADPCFQLRSICYLLGQPEPPAPGTALPAPDRKRFSLQSYADYISADELAQVEQMLAHLTSASAQAAAASLPTSEEDLCPICYAHPISAVFQPCGHKSCKACINQHLMNNKDCFFCKTTIVSVEDWEKGANTSTTSSAA

SEQ ID NO: 5 - DNA, 7578 bp, Homo sapiens
  CDS (1)..(7578)
atggcgagcgactccccggctcgaagcctggatgaaatagatctctcggctctgagggaccccgcagggatctttgaattggtggaacttgttggaaatggaacatacgggcaagtttataagggtcgtcatgtcaaaacgggccagcttgcagccatcaaggttatggatgtcacaggggatgaagaggaagaaatcaaacaagaaattaacatgttgaagaaatattctcatcaccggaatattgctacatactatggtgcttttatcaaaaagaacccaccaggcatggatgaccaactttggttggtgatggagttttgtggtgctggctctgtcaccgacctgatcaagaacacaaaaggtaacacgttgaaagaggagtggattgcatacatctgcagggaaatcttacgggggctgagtcacctgcaccagcataaagtgattcatcgagatattaaagggcaaaatgtcttgctgactgaaaatgcagaagttaaactagtggactttggagtcagtgctcagcttgatcgaacagtgggcaggaggaatactttcattggaactccctactggatggcaccagaagttattgcctgtgatgaaaacccagatgccacatatgatttcaagagtgacttgtggtctttgggtatcaccgccattgaaatggcagaaggtgctccccctctctgtgacatgcaccccatgagagctctcttcctcatcccccggaacccagcgcctcggctgaagtctaagaagtggtcaaaaaaattccagtcatttattgagagctgcttggtaaagaatcacagccagcgaccagcaacagaacaattgatgaagcatccatttatacgagaccaacctaatgagcgacaggtccgcattcaactcaaggaccatattgatagaacaaagaagaagcgaggagaaaaagatgagacagagtatgagtacagtggaagtgaggaagaagaggaggagaatgactcaggagagcccagctccatcctgaatctgccaggggagtcgacgctgcggagggactttctgaggctgcagctggccaacaaggagcgttctgaggccctacggaggcagcagctggagcagcagcagcgggagaatgaggagcacaagcggcagctgctggccgagcgtcagaagcgcatcgaggagcagaaagagcagaggcggcggctggaggagcaacaaaggcgagagaaggagctgcggaagcagcaggagagggagcagcgccggcactatgaggagcagatgcgccgggaggaggagaggaggcgtgcggagcatgaacaggaatacatcaggcgacagttagaggaggagcagagacagttagagatcttgcagcagcagctactgcatgaacaagctctacttctggaatataagcgcaaacaattggaagaacagagacaagcagaaagactgcagaggcagctaaagcaagaaagagactacttagtttcccttcagcatcagcggcaggagcagaggcctgtggagaagaagccactgtaccattacaaagaaggaatgagtcctagtgagaagccagcatgggccaaggaggtagaagaacggtcaaggctcaaccggcaaagttcccctgccatgcctcacaaggttgccaacaggatatctgaccccaacctgcccccaaggtcggagtccttcagcattagtggagttcagcctgctcgaacaccccccatgctcagaccagtcgatccccagatcccacatctggtagctgtaaaatcccagggacctgccttgaccgcctcccagtcagtgcacgagcagcccacaaagggcctctctgggtttcaggaggctctgaacgtgacctcccaccgcgtggagatgccacgccagaactcagatcccacctcggaaaatcctcctctccccactcgcattgaaaagtttgaccgaagctcttggttacgacaggaagaagacattccaccaaaggtgcctcaaagaacaacttctatatccccagcattagccagaaagaattctcctgggaatggtagtgctctgggacccagactaggatctcaacccatcagagcaagcaaccctgatctccggagaactgagcccatcttggagagccccttgcagaggaccagcagtggcagttcctccagctccagcacccctagctcccagcccagctcccaaggaggctcccagcctggatcacaagcaggatccagtgaacgcaccagagttcgagccaacagtaagtcagaaggatcacctgtgctcccccatgagcctgccaaggtgaaaccagaagaatccagggacattacccggcccagtcgaccagctgatctgacggcattagccaaagaactaagagaactccggattgaagaaacaaaccgcccaatgaagaaggtgactgattactcctcctccagtgaggagtcagaaagtagcgaggaagaggaggaagatggagagagcgagacccatgatgggacagtggctgtcagcgacatacccagactgataccaacaggagctccaggcagcaacgagcagtacaatgtgggaatggtggggacgcatgggctggagacctctcatgcggacagtttcagcggcagtatttcaagagaaggaaccttgatgattagagagacgtctggagagaagaagcgatctggccacagtgacagcaatggctttgctggccacatcaacctccctgacctggtgcagcagagccattctccagctggaaccccgactgagggactggggcgcgtctcaacccattcccaggagatggactctgggactgaatatggcatggggagcagcaccaaagcctccttcaccccctttgtggaccccagagtataccagacgtctcccactgatgaagatgaagaggatgaggaatcatcagccgcagctctgtttactagcgaacttcttaggcaagaacaggccaaactcaatgaagcaagaaagatttcggtggtaaatgtaaacccaaccaacattcggcctcatagcgacacaccagaaatcagaaaatacaagaaacgattcaactcagaaatactttgtgcagctctgtggggtgtaaaccttctggtggggactgaaaatggcctgatgcttttggaccgaagtgggcaaggcaaagtctataatctgatcaaccggaggcgatttcagcagatggatgtgctagagggactgaatgtccttgtgacaatttcaggaaagaagaataagctacgagtttactatctttcatggttaagaaacagaatactacataatgacccagaagtagaaaagaaacaaggctggatcactgttggggacttggaaggctgtatacattataaagttgttaaatatgaaaggatcaaatttttggtgattgccttaaagaatgctgtggaaatatatgcttgggctcctaaaccgtatcataaattcatggcatttaagtcttttgcagatctccagcacaagcctctgctagttgatctcacggtagaagaaggtcaaagattaaaggttatttttggttcacacactggtttccatgtaattgatgttgattcaggaaactcttatgatatctacataccatctcatattcagggcaatatcactcctcatgctattgtcatcttgcctaaaacagatggaatggaaatgcttgtttgctatgaggatgagggggtgtatgtaaacacctatggccggataactaaggatgtggtgctccaatggggagaaatgcccacgtctgtggcctacattcattccaatcagataatgggctggggcgagaaagctattgagatccggtcagtggaaacaggacatttggatggagtatttatgcataagcgagctcaaaggttaaagtttctatgtgaaagaaatgataaggtgattggacacagcaactttggcaccatccgctctaccacatgcgtgtacaaagggaaatggctctacgaggtcctcatctcctcccaggggctcatgcagatcggctggtgcaccatcagctgccgcttcaaccaggaggagggggttggagatacacacaactcctatgcctatgatggcaaccgcgtgcgcaagtggaatgtgaccacaacgaattatggcaaggcgtgggcagcgggggacatcgtgagctgcctgattgacctggatgatggcactctgtccttctgcctgaacggtgtatcactgggcactgcctttgagaacctgtccaggggcctgggtatggcctacttcccagccatcagcctctctttcaaggagtccgtggccttcaactttggcagccgtcctctgcgctacccagtggcaggctaccggcccctgcaggacccaccgagtgctgacctggtgcgggcacagaggttgctgggctgcttccgggcagtgctgagtgtggagctggaccctgtggaggggcggctgttggacaaggagagctccaagtggcggttgcggggccagcccaccgtcctcctcacactggcccacatcttccatcactttgcaccgcttctgcgcaaggtgtatctggtggaggctgtgctcatgagcttcttgctgggcatcgtggagaagggcacacccacacaggcacagtccgtggtgcaccaggtcctggacctcttgtggctcttcatggaggactacgaggtacaagattgcctcaagcagttgatgatgtctctgcttcggctgtaccgattctcacccattgtcccagacctgggcctacagatccattacctgcggctcactatcgccatcctgaggcatgagaagtcccgcaagtttctgcttagcaatgtcctcttcgacgtgctccgctccgtcgtcttcttttacatcaagagccccctgcgtgtggaggaggccggcctgcaggagctcattcccaccacctggtggccccactgctccagtagggagggcaaagagagcacggagatgaaggaggagaccgcagaggagcggctgcggcggcgagcctacgaacggggctgtcagcggctcaggaagcgcatcgaagtggtggaagaactacaggtccagatcctgaagctgctgctggacaataaagatgacaatgggggtgaagcttctaggtatatcttcctgaccaagtttcgcaagtttctgcaggagaacgccagtggccgggggaacatgcccatgctctgcccccctgagtacatggtctgcttcttacaccggctgatctctgccctgcgctactattgggatgaatacaaggcttccaatcctcatgcttccttcagtgaggaggcctacatcccgccccaggtcttctataatggcaaggtggactactttgacctgcagcgcctggggggcctcctctcgcacctgcggaagaccctcaaagatgaccttgcttccaaagccaacattgtgatcgacccactggagctccagtcaaccgccatggatgacctagatgaggatgaggagccagccccagctatggcccagcgccccatgcaggccctggctgttggggggccactgcccctgccccggcccggctggctcagttctccaactttgggccgagccaaccgcttcctcagcacagcggctgtgagcctcatgaccccacggcggcctctgagcacctcggagaaagtgaaggtccgcacgctgagcgtggagcagaggacccgtgaggacattgaaggcagccactggaatgagggcttgctgctggggcggccccccgaggagcctgagcagcccctcaccgagaactcgctgctggaagtcctggatggggcggtcatgatgtacaacctcagcgtacaccagcagctgggcaagatggtgggtgtctccgatgatgtcaatgaatacgctatggctctgagggacacagaggacaagctccgccggtgccccaagaggaggaaggacatccttgcagagttgaccaagagccagaaggttttctcagaaaagctggaccacctgagccgccgtcttgcctgggtccatgccactgtctactcccaggagaagatgctggacatctactggctgctgcgcgtctgcctgcggaccattgagcacggtgatcgcacagggtctctctttgccttcatgcccgagttctacctgagcgtggccatcaacagctacagtgctctcaagaattactttggtcccgtgcacagcatggaggagctcccaggctatgaagagaccctgacccgcctggctgccattctcgccaaacactttgccgacgcacgcattgtgggcactgacatccgagactcactgatgcaggccctggccagctacgtgtgctacccacactccctgcgggctgtggagcgaatccccgaggagcagcgtatcgccatggtgaggaacctcctggcgccctatgagcagcggccctgggcccagaccaactggatcctggtgcggctctggaggggctgtggcttcgggtaccgctatacacggctgccacatctgctgaaaaccaaacttgaggacgccaatttgcccagcctccagaagccctgcccttccaccctgctgcagcagcacatggcggacctcctacagcagggtcctgatgtggcacccagcttcctcaacagcgtcctcaatcagctcaactgggccttctctgaattcattggcatgatccaagagatccagcaggctgctgagcgcctggagcggaactttgtggacagccggcagctcaaggtatgtgccacctgctttgacctctcggtcagcctgctgcgtgtcttggagatgactatcacactggtgcctgagatattccttgactggacccggcctacctctgagatgctgctgcggcgtcttgcacagctgctaaaccaggtgctgaaccgggtgacagctgagaggaacctgtttgatcgtgtggtcaccctacggctgcctggcctagagagcgtggaccactatcccattctggtggcagtgacgggcatcctggtgcagctcctggtgcgtggcccagcctcagagagagagcaagccacatcagtgctcctggcagatccctgcttccagctacgctcaatatgctatctcctgggacagccagagcccccagcacctggcactgctctgccagcccctgaccggaagcgcttctccctgcagagctatgcggattatatcagtgccgatgagctggcccaagtggaacagatgctggcgcacctgacctctgcatctgcccaggcagcagctgcctccctgcccaccagtgaggaggacctctgccccatctgctatgcccaccccatctctgctgtgttccagccctgtggccacaagtcctgcaaagcctgtatcaaccagcacctgatgaacaacaaggactgcttcttctgcaaaaccaccatcgtgtctgtagaggactgggagaagggagccaatacgagtactacctcctcagctgcctag

SEQ ID NO: 6 - protein, 2525 aa, Homo sapiens
MASDSPARSLDEIDLSALRDPAGIFELVELVGNGTYGQVYKGRHVKTGQLAAIKVMDVTGDEEEEIKQEINMLKKYSHHRNIATYYGAFIKKNPPGMDDQLWLVMEFCGAGSVTDLIKNTKGNTLKEEWIAYICREILRGLSHLHQHKVIHRDIKGQNVLLTENAEVKLVDFGVSAQLDRTVGRRNTFIGTPYWMAPEVIACDENPDATYDFKSDLWSLGITAIEMAEGAPPLCDMHPMRALFLIPRNPAPRLKSKKWSKKFQSFIESCLVKNHSQRPATEQLMKHPFIRDQPNERQVRIQLKDHIDRTKKKRGEKDETEYEYSGSEEEEEENDSGEPSSILNLPGESTLRRDFLRLQLANKERSEALRRQQLEQQQRENEEHKRQLLAERQKRIEEQKEQRRRLEEQQRREKELRKQQEREQRRHYEEQMRREEERRRAEHEQEYIRRQLEEEQRQLEILQQQLLHEQALLLEYKRKQLEEQRQAERLQRQLKQERDYLVSLQHQRQEQRPVEKKPLYHYKEGMSPSEKPAWAKEVEERSRLNRQSSPAMPHKVANRISDPNLPPRSESFSISGVQPARTPPMLRPVDPQIPHLVAVKSQGPALTASQSVHEQPTKGLSGFQEALNVTSHRVEMPRQNSDPTSENPPLPTRIEKFDRSSWLRQEEDIPPKVPQRTTSISPALARKNSPGNGSALGPRLGSQPIRASNPDLRRTEPILESPLQRTSSGSSSSSSTPSSQPSSQGGSQPGSQAGSSERTRVRANSKSEGSPVLPHEPAKVKPEESRDITRPSRPADLTALAKELRELRIEETNRPMKKVTDYSSSSEESESSEEEEEDGESETHDGTVAVSDIPRLIPTGAPGSNEQYNVGMVGTHGLETSHADSFSGSISREGTLMIRETSGEKKRSGHSDSNGFAGHINLPDLVQQSHSPAGTPTEGLGRVSTHSQEMDSGTEYGMGSSTKASFTPFVDPRVYQTSPTDEDEEDEESSAAALFTSELLRQEQAKLNEARKISVVNVNPTNIRPHSDTPEIRKYKKRFNSEILCAALWGVNLLVGTENGLMLLDRSGQGKVYNLINRRRFQQMDVLEGLNVLVTISGKKNKLRVYYLSWLRNRILHNDPEVEKKQGWITVGDLEGCIHYKVVKYERIKFLVIALKNAVEIYAWAPKPYHKFMAFKSFADLQHKPLLVDLTVEEGQRLKVIFGSHTGFHVIDVDSGNSYDIYIPSHIQGNITPHAIVILPKTDGMEMLVCYEDEGVYVNTYGRITKDVVLQWGEMPTSVAYIHSNQIMGWGEKAIEIRSVETGHLDGVFMHKRAQRLKFLCERNDKVIGHSNFGTIRSTTCVYKGKWLYEVLISSQGLMQIGWCTISCRFNQEEGVGDTHNSYAYDGNRVRKWNVTTTNYGKAWAAGDIVSCLIDLDDGTLSFCLNGVSLGTAFENLSRGLGMAYFPAISLSFKESVAFNFGSRPLRYPVAGYRPLQDPPSADLVRAQRLLGCFRAVLSVELDPVEGRLLDKESSKWRLRGQPTVLLTLAHIFHHFAPLLRKVYLVEAVLMSFLLGIVEKGTPTQAQSVVHQVLDLLWLFMEDYEVQDCLKQLMMSLLRLYRFSPIVPDLGLQIHYLRLTIAILRHEKSRKFLLSNVLFDVLRSVVFFYIKSPLRVEEAGLQELIPTTWWPHCSSREGKESTEMKEETAEERLRRRAYERGCQRLRKRIEVVEELQVQILKLLLDNKDDNGGEASRYIFLTKFRKFLQENASGRGNMPMLCPPEYMVCFLHRLISALRYYWDEYKASNPHASFSEEAYIPPQVFYNGKVDYFDLQRLGGLLSHLRKTLKDDLASKANIVIDPLELQSTAMDDLDEDEEPAPAMAQRPMQALAVGGPLPLPRPGWLSSPTLGRANRFLSTAAVSLMTPRRPLSTSEKVKVRTLSVEQRTREDIEGSHWNEGLLLGRPPEEPEQPLTENSLLEVLDGAVMMYNLSVHQQLGKMVGVSDDVNEYAMALRDTEDKLRRCPKRRKDILAELTKSQKVFSEKLDHLSRRLAWVHATVYSQEKMLDIYWLLRVCLRTIEHGDRTGSLFAFMPEFYLSVAINSYSALKNYFGPVHSMEELPGYEETLTRLAAILAKHFADARIVGTDIRDSLMQALASYVCYPHSLRAVERIPEEQRIAMVRNLLAPYEQRPWAQTNWILVRLWRGCGFGYRYTRLPHLLKTKLEDANLPSLQKPCPSTLLQQHMADLLQQGPDVAPSFLNSVLNQLNWAFSEFIGMIQEIQQAAERLERNFVDSRQLKVCATCFDLSVSLLRVLEMTITLVPEIFLDWTRPTSEMLLRRLAQLLNQVLNRVTAERNLFDRVVTLRLPGLESVDHYPILVAVTGILVQLLVRGPASEREQATSVLLADPCFQLRSICYLLGQPEPPAPGTALPAPDRKRFSLQSYADYISADELAQVEQMLAHLTSASAQAAAASLPTSEEDLCPICYAHPISAVFQPCGHKSCKACINQHLMNNKDCFFCKTTIVSVEDWEKGANTSTTSSAA

SEQ ID NO: 7 - DNA, 7515 bp, Homo sapiens
  CDS (1)..(7515)
atggcgagcgactccccggctcgaagcctggatgaaatagatctctcggctctgagggaccccgcagggatctttgaattggtggaacttgttggaaatggaacatacgggcaagtttataagggtcgtcatgtcaaaacgggccagcttgcagccatcaaggttatggatgtcacaggggatgaagaggaagaaatcaaacaagaaattaacatgttgaagaaatattctcatcaccggaatattgctacatactatggtgcttttatcaaaaagaacccaccaggcatggatgaccaactttggttggtgatggagttttgtggtgctggctctgtcaccgacctgatcaagaacacaaaaggtaacacgttgaaagaggagtggattgcatacatctgcagggaaatcttacgggggctgagtcacctgcaccagcataaagtgattcatcgagatattaaagggcaaaatgtcttgctgactgaaaatgcagaagttaaactagtggactttggagtcagtgctcagcttgatcgaacagtgggcaggaggaatactttcattggaactccctactggatggcaccagaagttattgcctgtgatgaaaacccagatgccacatatgatttcaagagtgacttgtggtctttgggtatcaccgccattgaaatggcagaaggtgctccccctctctgtgacatgcaccccatgagagctctcttcctcatcccccggaacccagcgcctcggctgaagtctaagaagtggtcaaaaaaattccagtcatttattgagagctgcttggtaaagaatcacagccagcgaccagcaacagaacaattgatgaagcatccatttatacgagaccaacctaatgagcgacaggtccgcattcaactcaaggaccatattgatagaacaaagaagaagcgaggagaaaaagatgagacagagtatgagtacagtggaagtgaggaagaagaggaggagaatgactcaggagagcccagctccatcctgaatctgccaggggagtcgacgctgcggagggactttctgaggctgcagctggccaacaaggagcgttctgaggccctacggaggcagcagctggagcagcagcagcgggagaatgaggagcacaagcggcagctgctggccgagcgtcagaagcgcatcgaggagcagaaagagcagaggcggcggctggaggagcaacaaaggcgagagaaggagctgcggaagcagcaggagagggagcagcgccggcactatgaggagcagatgcgccgggaggaggagaggaggcgtgcggagcatgaacaggaatataagcgcaaacaattggaagaacagagacaagcagaaagactgcagaggcagctaaagcaagaaagagactacttagtttcccttcagcatcagcggcaggagcagaggcctgtggagaagaagccactgtaccattacaaagaaggaatgagtcctagtgagaagccagcatgggccaaggaggtagaagaacggtcaaggctcaaccggcaaagttcccctgccatgcctcacaaggttgccaacaggatatctgaccccaacctgcccccaaggtcggagtccttcagcattagtggagttcagcctgctcgaacaccccccatgctcagaccagtcgatccccagatcccacatctggtagctgtaaaatcccagggacctgccttgaccgcctcccagtcagtgcacgagcagcccacaaagggcctctctgggtttcaggaggctctgaacgtgacctcccaccgcgtggagatgccacgccagaactcagatcccacctcggaaaatcctcctctccccactcgcattgaaaagtttgaccgaagctcttggttacgacaggaagaagacattccaccaaaggtgcctcaaagaacaacttctatatccccagcattagccagaaagaattctcctgggaatggtagtgctctgggacccagactaggatctcaacccatcagagcaagcaaccctgatctccggagaactgagcccatcttggagagccccttgcagaggaccagcagtggcagttcctccagctccagcacccctagctcccagcccagctcccaaggaggctcccagcctggatcacaagcaggatccagtgaacgcaccagagttcgagccaacagtaagtcagaaggatcacctgtgctcccccatgagcctgccaaggtgaaaccagaagaatccagggacattacccggcccagtcgaccagctagctacaaaaaagctatagatgaggatctgacggcattagccaaagaactaagagaactccggattgaagaaacaaaccgcccaatgaagaaggtgactgattactcctcctccagtgaggagtcagaaagtagcgaggaagaggaggaagatggagagagcgagacccatgatgggacagtggctgtcagcgacatacccagactgataccaacaggagctccaggcagcaacgagcagtacaatgtgggaatggtggggacgcatgggctggagacctctcatgcggacagtttcagcggcagtatttcaagagaaggaaccttgatgattagagagacgtctggagagaagaagcgatctggccacagtgacagcaatggctttgctggccacatcaacctccctgacctggtgcagcagagccattctccagctggaaccccgactgagggactggggcgcgtctcaacccattcccaggagatggactctgggactgaatatggcatggggagcagcaccaaagcctccttcaccccctttgtggaccccagagtataccagacgtctcccactgatgaagatgaagaggatgaggaatcatcagccgcagctctgtttactagcgaacttcttaggcaagaacaggccaaactcaatgaagcaagaaagatttcggtggtaaatgtaaacccaaccaacattcggcctcatagcgacacaccagaaatcagaaaatacaagaaacgattcaactcagaaatactttgtgcagctctgtggggtgtaaaccttctggtggggactgaaaatggcctgatgcttttggaccgaagtgggcaaggcaaagtctataatctgatcaaccggaggcgatttcagcagatggatgtgctagagggactgaatgtccttgtgacaatttcaggaaagaagaataagctacgagtttactatctttcatggttaagaaacagaatactacataatgacccagaagtagaaaagaaacaaggctggatcactgttggggacttggaaggctgtatacattataaagttgttaaatatgaaaggatcaaatttttggtgattgccttaaagaatgctgtggaaatatatgcttgggctcctaaaccgtatcataaattcatggcatttaagtcttttgcagatctccagcacaagcctctgctagttgatctcacggtagaagaaggtcaaagattaaaggttatttttggttcacacactggtttccatgtaattgatgttgattcaggaaactcttatgatatctacataccatctcatattcagggcaatatcactcctcatgctattgtcatcttgcctaaaacagatggaatggaaatgcttgtttgctatgaggatgagggggtgtatgtaaacacctatggccggataactaaggatgtggtgctccaatggggagaaatgcccacgtctgtggcctacattcattccaatcagataatgggctggggcgagaaagctattgagatccggtcagtggaaacaggacatttggatggagtatttatgcataagcgagctcaaaggttaaagtttctatgtgaaagaaatgataaggtgattggacacagcaactttggcaccatccgctctaccacatgcgtgtacaaagggaaatggctctacgaggtcctcatctcctcccaggggctcatgcagatcggctggtgcaccatcagctgccgcttcaaccaggaggagggggttggagatacacacaactcctatgcctatgatggcaaccgcgtgcgcaagtggaatgtgaccacaacgaattatggcaaggcgtgggcagcgggggacatcgtgagctgcctgattgacctggatgatggcactctgtccttctgcctgaacggtgtatcactgggcactgcctttgagaacctgtccaggggcctgggtatggcctacttcccagccatcagcctctctttcaaggagtccgtggccttcaactttggcagccgtcctctgcgctacccagtggcaggctaccggcccctgcaggacccaccgagtgctgacctggtgcgggcacagaggttgctgggctgcttccgggcagtgctgagtgtggagctggaccctgtggaggggcggctgttggacaaggagagctccaagtggcggttgcggggccagcccaccgtcctcctcacactggcccacatcttccatcactttgcaccgcttctgcgcaaggtgtatctggtggaggctgtgctcatgagcttcttgctgggcatcgtggagaagggcacacccacacaggcacagtccgtggtgcaccaggtcctggacctcttgtggctcttcatggaggactacgaggtacaagattgcctcaagcagttgatgatgtctctgcttcggctgtaccgattctcacccattgtcccagacctgggcctacagatccattacctgcggctcactatcgccatcctgaggcatgagaagtcccgcaagtttctgcttagcaatgtcctcttcgacgtgctccgctccgtcgtcttcttttacatcaagagccccctgcgtgtggaggaggccggcctgcaggagctcattcccaccacctggtggccccactgctccagtagggagggcaaagagagcacggagatgaaggaggagaccgcagaggagcggctgcggcggcgagcctacgaacggggctgtcagcggctcaggaagcgcatcgaagtggtggaagaactacaggtccagatcctgaagctgctgctggacaataaagatgacaatgggggtgaagcttctaggtatatcttcctgaccaagtttcgcaagtttctgcaggagaacgccagtggccgggggaacatgcccatgctctgcccccctgagtacatggtctgcttcttacaccggctgatctctgccctgcgctactattgggatgaatacaaggcttccaatcctcatgcttccttcagtgaggaggcctacatcccgccccaggtcttctataatggcaaggtggactactttgacctgcagcgcctggggggcctcctctcgcacctgcggaagaccctcaaagatgaccttgcttccaaagccaacattgtgatcgacccactggagctccagtcaaccgccatggatgacctagatgaggatgaggagccagccccagctatggcccagcgccccatgcaggccctggctgttggggggccactgcccctgccccggcccggctggctcagttctccaactttgggccgagccaaccgcttcctcagcacagcggctgtgagcctcatgaccccacggcggcctctgagcacctcggagaaagtgaaggtccgcacgctgagcgtggagcagaggacccgtgaggacattgaaggcagccactggaatgagggcttgctgctggggcggccccccgaggagcctgagcagcccctcaccgagaactcgctgctggaagtcctggatggggcggtcatgatgtacaacctcagcgtacaccagcagctgggcaagatggtgggtgtctccgatgatgtcaatgaatacgctatggctctgagggacacagaggacaagctccgccggtgccccaagaggaggaaggacatccttgcagagttgaccaagagccagaaggttttctcagaaaagctggaccacctgagccgccgtcttgcctgggtccatgccactgtctactcccaggagaagatgctggacatctactggctgctgcgcgtctgcctgcggaccattgagcacggtgatcgcacagggtctctctttgccttcatgcccgagttctacctgagcgtggccatcaacagctacagtgctctcaagaattactttggtcccgtgcacagcatggaggagctcccaggctatgaagagaccctgacccgcctggctgccattctcgccaaacactttgccgacgcacgcattgtgggcactgacatccgagactcactgatgcaggccctggccagctacgtgtgctacccacactccctgcgggctgtggagcgaatccccgaggagcagcgtatcgccatggtgaggaacctcctggcgccctatgagcagcggccctgggcccagaccaactggatcctggtgcggctctggaggggctgtggcttcgggtaccgctatacacggctgccacatctgctgaaaaccaaacttgaggacgccaatttgcccagcctccagaagccctgcccttccaccctgctgcagcagcacatggcggacctcctacagcagggtcctgatgtggcacccagcttcctcaacagcgtcctcaatcagctcaactgggccttctctgaattcattggcatgatccaagagatccagcaggctgctgagcgcctggagcggaactttgtggacagccggcagctcaaggtatgtgccacctgctttgacctctcggtcagcctgctgcgtgtcttggagatgactatcacactggtgcctgagatattccttgactggacccggcctacctctgagatgctgctgcggcgtcttgcacagctgctaaaccaggtgctgaaccgggtgacagctgagaggaacctgtttgatcgtgtggtcaccctacggctgcctggcctagagagcgtggaccactatcccattctggtggcagtgacgggcatcctggtgcagctcctggtgcgtggcccagcctcagagagagagcaagccacatcagtgctcctggcagatccctgcttccagctacgctcaatatgctatctcctgggacagccagagcccccagcacctggcactgctctgccagcccctgaccggaagcgcttctccctgcagagctatgcggattatatcagtgccgatgagctggcccaagtggaacagatgctggcgcacctgacctctgcatctgcccaggcagcagctgcctccctgcccaccagtgaggaggacctctgccccatctgctatgcccaccccatctctgctgtgttccagccctgtggccacaagtcctgcaaagcctgtatcaaccagcacctgatgaacaacaaggactgcttcttctgcaaaaccaccatcgtgtctgtagaggactgggagaagggagccaatacgagtactacctcctcagctgcctag

SEQ ID NO: 8 - protein, 2504 aa, Homo sapiens
MASDSPARSLDEIDLSALRDPAGIFELVELVGNGTYGQVYKGRHVKTGQLAAIKVMDVTGDEEEEIKQEINMLKKYSHHRNIATYYGAFIKKNPPGMDDQLWLVMEFCGAGSVTDLIKNTKGNTLKEEWIAYICREILRGLSHLHQHKVIHRDIKGQNVLLTENAEVKLVDFGVSAQLDRTVGRRNTFIGTPYWMAPEVIACDENPDATYDFKSDLWSLGITAIEMAEGAPPLCDMHPMRALFLIPRNPAPRLKSKKWSKKFQSFIESCLVKNHSQRPATEQLMKHPFIRDQPNERQVRIQLKDHIDRTKKKRGEKDETEYEYSGSEEEEEENDSGEPSSILNLPGESTLRRDFLRLQLANKERSEALRRQQLEQQQRENEEHKRQLLAERQKRIEEQKEQRRRLEEQQRREKELRKQQEREQRRHYEEQMRREEERRRAEHEQEYKRKQLEEQRQAERLQRQLKQERDYLVSLQHQRQEQRPVEKKPLYHYKEGMSPSEKPAWAKEVEERSRLNRQSSPAMPHKVANRISDPNLPPRSESFSISGVQPARTPPMLRPVDPQIPHLVAVKSQGPALTASQSVHEQPTKGLSGFQEALNVTSHRVEMPRQNSDPTSENPPLPTRIEKFDRSSWLRQEEDIPPKVPQRTTSISPALARKNSPGNGSALGPRLGSQPIRASNPDLRRTEPILESPLQRTSSGSSSSSSTPSSQPSSQGGSQPGSQAGSSERTRVRANSKSEGSPVLPHEPAKVKPEESRDITRPSRPASYKKAIDEDLTALAKELRELRIEETNRPMKKVTDYSSSSEESESSEEEEEDGESETHDGTVAVSDIPRLIPTGAPGSNEQYNVGMVGTHGLETSHADSFSGSISREGTLMIRETSGEKKRSGHSDSNGFAGHINLPDLVQQSHSPAGTPTEGLGRVSTHSQEMDSGTEYGMGSSTKASFTPFVDPRVYQTSPTDEDEEDEESSAAALFTSELLRQEQAKLNEARKISVVNVNPTNIRPHSDTPEIRKYKKRFNSEILCAALWGVNLLVGTENGLMLLDRSGQGKVYNLINRRRFQQMDVLEGLNVLVTISGKKNKLRVYYLSWLRNRILHNDPEVEKKQGWITVGDLEGCIHYKVVKYERIKFLVIALKNAVEIYAWAPKPYHKFMAFKSFADLQHKPLLVDLTVEEGQRLKVIFGSHTGFHVIDVDSGNSYDIYIPSHIQGNITPHAIVILPKTDGMEMLVCYEDEGVYVNTYGRITKDVVLQWGEMPTSVAYIHSNQIMGWGEKAIEIRSVETGHLDGVFMHKRAQRLKFLCERNDKVIGHSNFGTIRSTTCVYKGKWLYEVLISSQGLMQIGWCTISCRFNQEEGVGDTHNSYAYDGNRVRKWNVTTTNYGKAWAAGDIVSCLIDLDDGTLSFCLNGVSLGTAFENLSRGLGMAYFPAISLSFKESVAFNFGSRPLRYPVAGYRPLQDPPSADLVRAQRLLGCFRAVLSVELDPVEGRLLDKESSKWRLRGQPTVLLTLAHIFHHFAPLLRKVYLVEAVLMSFLLGIVEKGTPTQAQSVVHQVLDLLWLFMEDYEVQDCLKQLMMSLLRLYRFSPIVPDLGLQIHYLRLTIAILRHEKSRKFLLSNVLFDVLRSVVFFYIKSPLRVEEAGLQELIPTTWWPHCSSREGKESTEMKEETAEERLRRRAYERGCQRLRKRIEVVEELQVQILKLLLDNKDDNGGEASRYIFLTKFRKFLQENASGRGNMPMLCPPEYMVCFLHRLISALRYYWDEYKASNPHASFSEEAYIPPQVFYNGKVDYFDLQRLGGLLSHLRKTLKDDLASKANIVIDPLELQSTAMDDLDEDEEPAPAMAQRPMQALAVGGPLPLPRPGWLSSPTLGRANRFLSTAAVSLMTPRRPLSTSEKVKVRTLSVEQRTREDIEGSHWNEGLLLGRPPEEPEQPLTENSLLEVLDGAVMMYNLSVHQQLGKMVGVSDDVNEYAMALRDTEDKLRRCPKRRKDILAELTKSQKVFSEKLDHLSRRLAWVHATVYSQEKMLDIYWLLRVCLRTIEHGDRTGSLFAFMPEFYLSVAINSYSALKNYFGPVHSMEELPGYEETLTRLAAILAKHFADARIVGTDIRDSLMQALASYVCYPHSLRAVERIPEEQRIAMVRNLLAPYEQRPWAQTNWILVRLWRGCGFGYRYTRLPHLLKTKLEDANLPSLQKPCPSTLLQQHMADLLQQGPDVAPSFLNSVLNQLNWAFSEFIGMIQEIQQAAERLERNFVDSRQLKVCATCFDLSVSLLRVLEMTITLVPEIFLDWTRPTSEMLLRRLAQLLNQVLNRVTAERNLFDRVVTLRLPGLESVDHYPILVAVTGILVQLLVRGPASEREQATSVLLADPCFQLRSICYLLGQPEPPAPGTALPAPDRKRFSLQSYADYISADELAQVEQMLAHLTSASAQAAAASLPTSEEDLCPICYAHPISAVFQPCGHKSCKACINQHLMNNKDCFFCKTTIVSVEDWEKGANTSTTSSAA

SEQ ID NO: 9 - DNA, 7491 bp, Homo sapiens
  CDS (1)..(7491)
atggcgagcgactccccggctcgaagcctggatgaaatagatctctcggctctgagggaccccgcagggatctttgaattggtggaacttgttggaaatggaacatacgggcaagtttataagggtcgtcatgtcaaaacgggccagcttgcagccatcaaggttatggatgtcacaggggatgaagaggaagaaatcaaacaagaaattaacatgttgaagaaatattctcatcaccggaatattgctacatactatggtgcttttatcaaaaagaacccaccaggcatggatgaccaactttggttggtgatggagttttgtggtgctggctctgtcaccgacctgatcaagaacacaaaaggtaacacgttgaaagaggagtggattgcatacatctgcagggaaatcttacgggggctgagtcacctgcaccagcataaagtgattcatcgagatattaaagggcaaaatgtcttgctgactgaaaatgcagaagttaaactagtggactttggagtcagtgctcagcttgatcgaacagtgggcaggaggaatactttcattggaactccctactggatggcaccagaagttattgcctgtgatgaaaacccagatgccacatatgatttcaagagtgacttgtggtctttgggtatcaccgccattgaaatggcagaaggtgctccccctctctgtgacatgcaccccatgagagctctcttcctcatcccccggaacccagcgcctcggctgaagtctaagaagtggtcaaaaaaattccagtcatttattgagagctgcttggtaaagaatcacagccagcgaccagcaacagaacaattgatgaagcatccatttatacgagaccaacctaatgagcgacaggtccgcattcaactcaaggaccatattgatagaacaaagaagaagcgaggagaaaaagatgagacagagtatgagtacagtggaagtgaggaagaagaggaggagaatgactcaggagagcccagctccatcctgaatctgccaggggagtcgacgctgcggagggactttctgaggctgcagctggccaacaaggagcgttctgaggccctacggaggcagcagctggagcagcagcagcgggagaatgaggagcacaagcggcagctgctggccgagcgtcagaagcgcatcgaggagcagaaagagcagaggcggcggctggaggagcaacaaaggcgagagaaggagctgcggaagcagcaggagagggagcagcgccggcactatgaggagcagatgcgccgggaggaggagaggaggcgtgcggagcatgaacaggaatataagcgcaaacaattggaagaacagagacaagcagaaagactgcagaggcagctaaagcaagaaagagactacttagtttcccttcagcatcagcggcaggagcagaggcctgtggagaagaagccactgtaccattacaaagaaggaatgagtcctagtgagaagccagcatgggccaaggaggtagaagaacggtcaaggctcaaccggcaaagttcccctgccatgcctcacaaggttgccaacaggatatctgaccccaacctgcccccaaggtcggagtccttcagcattagtggagttcagcctgctcgaacaccccccatgctcagaccagtcgatccccagatcccacatctggtagctgtaaaatcccagggacctgccttgaccgcctcccagtcagtgcacgagcagcccacaaagggcctctctgggtttcaggaggctctgaacgtgacctcccaccgcgtggagatgccacgccagaactcagatcccacctcggaaaatcctcctctccccactcgcattgaaaagtttgaccgaagctcttggttacgacaggaagaagacattccaccaaaggtgcctcaaagaacaacttctatatccccagcattagccagaaagaattctcctgggaatggtagtgctctgggacccagactaggatctcaacccatcagagcaagcaaccctgatctccggagaactgagcccatcttggagagccccttgcagaggaccagcagtggcagttcctccagctccagcacccctagctcccagcccagctcccaaggaggctcccagcctggatcacaagcaggatccagtgaacgcaccagagttcgagccaacagtaagtcagaaggatcacctgtgctcccccatgagcctgccaaggtgaaaccagaagaatccagggacattacccggcccagtcgaccagctgatctgacggcattagccaaagaactaagagaactccggattgaagaaacaaaccgcccaatgaagaaggtgactgattactcctcctccagtgaggagtcagaaagtagcgaggaagaggaggaagatggagagagcgagacccatgatgggacagtggctgtcagcgacatacccagactgataccaacaggagctccaggcagcaacgagcagtacaatgtgggaatggtggggacgcatgggctggagacctctcatgcggacagtttcagcggcagtatttcaagagaaggaaccttgatgattagagagacgtctggagagaagaagcgatctggccacagtgacagcaatggctttgctggccacatcaacctccctgacctggtgcagcagagccattctccagctggaaccccgactgagggactggggcgcgtctcaacccattcccaggagatggactctgggactgaatatggcatggggagcagcaccaaagcctccttcaccccctttgtggaccccagagtataccagacgtctcccactgatgaagatgaagaggatgaggaatcatcagccgcagctctgtttactagcgaacttcttaggcaagaacaggccaaactcaatgaagcaagaaagatttcggtggtaaatgtaaacccaaccaacattcggcctcatagcgacacaccagaaatcagaaaatacaagaaacgattcaactcagaaatactttgtgcagctctgtggggtgtaaaccttctggtggggactgaaaatggcctgatgcttttggaccgaagtgggcaaggcaaagtctataatctgatcaaccggaggcgatttcagcagatggatgtgctagagggactgaatgtccttgtgacaatttcaggaaagaagaataagctacgagtttactatctttcatggttaagaaacagaatactacataatgacccagaagtagaaaagaaacaaggctggatcactgttggggacttggaaggctgtatacattataaagttgttaaatatgaaaggatcaaatttttggtgattgccttaaagaatgctgtggaaatatatgcttgggctcctaaaccgtatcataaattcatggcatttaagtcttttgcagatctccagcacaagcctctgctagttgatctcacggtagaagaaggtcaaagattaaaggttatttttggttcacacactggtttccatgtaattgatgttgattcaggaaactcttatgatatctacataccatctcatattcagggcaatatcactcctcatgctattgtcatcttgcctaaaacagatggaatggaaatgcttgtttgctatgaggatgagggggtgtatgtaaacacctatggccggataactaaggatgtggtgctccaatggggagaaatgcccacgtctgtggcctacattcattccaatcagataatgggctggggcgagaaagctattgagatccggtcagtggaaacaggacatttggatggagtatttatgcataagcgagctcaaaggttaaagtttctatgtgaaagaaatgataaggtgattggacacagcaactttggcaccatccgctctaccacatgcgtgtacaaagggaaatggctctacgaggtcctcatctcctcccaggggctcatgcagatcggctggtgcaccatcagctgccgcttcaaccaggaggagggggttggagatacacacaactcctatgcctatgatggcaaccgcgtgcgcaagtggaatgtgaccacaacgaattatggcaaggcgtgggcagcgggggacatcgtgagctgcctgattgacctggatgatggcactctgtccttctgcctgaacggtgtatcactgggcactgcctttgagaacctgtccaggggcctgggtatggcctacttcccagccatcagcctctctttcaaggagtccgtggccttcaactttggcagccgtcctctgcgctacccagtggcaggctaccggcccctgcaggacccaccgagtgctgacctggtgcgggcacagaggttgctgggctgcttccgggcagtgctgagtgtggagctggaccctgtggaggggcggctgttggacaaggagagctccaagtggcggttgcggggccagcccaccgtcctcctcacactggcccacatcttccatcactttgcaccgcttctgcgcaaggtgtatctggtggaggctgtgctcatgagcttcttgctgggcatcgtggagaagggcacacccacacaggcacagtccgtggtgcaccaggtcctggacctcttgtggctcttcatggaggactacgaggtacaagattgcctcaagcagttgatgatgtctctgcttcggctgtaccgattctcacccattgtcccagacctgggcctacagatccattacctgcggctcactatcgccatcctgaggcatgagaagtcccgcaagtttctgcttagcaatgtcctcttcgacgtgctccgctccgtcgtcttcttttacatcaagagccccctgcgtgtggaggaggccggcctgcaggagctcattcccaccacctggtggccccactgctccagtagggagggcaaagagagcacggagatgaaggaggagaccgcagaggagcggctgcggcggcgagcctacgaacggggctgtcagcggctcaggaagcgcatcgaagtggtggaagaactacaggtccagatcctgaagctgctgctggacaataaagatgacaatgggggtgaagcttctaggtatatcttcctgaccaagtttcgcaagtttctgcaggagaacgccagtggccgggggaacatgcccatgctctgcccccctgagtacatggtctgcttcttacaccggctgatctctgccctgcgctactattgggatgaatacaaggcttccaatcctcatgcttccttcagtgaggaggcctacatcccgccccaggtcttctataatggcaaggtggactactttgacctgcagcgcctggggggcctcctctcgcacctgcggaagaccctcaaagatgaccttgcttccaaagccaacattgtgatcgacccactggagctccagtcaaccgccatggatgacctagatgaggatgaggagccagccccagctatggcccagcgccccatgcaggccctggctgttggggggccactgcccctgccccggcccggctggctcagttctccaactttgggccgagccaaccgcttcctcagcacagcggctgtgagcctcatgaccccacggcggcctctgagcacctcggagaaagtgaaggtccgcacgctgagcgtggagcagaggacccgtgaggacattgaaggcagccactggaatgagggcttgctgctggggcggccccccgaggagcctgagcagcccctcaccgagaactcgctgctggaagtcctggatggggcggtcatgatgtacaacctcagcgtacaccagcagctgggcaagatggtgggtgtctccgatgatgtcaatgaatacgctatggctctgagggacacagaggacaagctccgccggtgccccaagaggaggaaggacatccttgcagagttgaccaagagccagaaggttttctcagaaaagctggaccacctgagccgccgtcttgcctgggtccatgccactgtctactcccaggagaagatgctggacatctactggctgctgcgcgtctgcctgcggaccattgagcacggtgatcgcacagggtctctctttgccttcatgcccgagttctacctgagcgtggccatcaacagctacagtgctctcaagaattactttggtcccgtgcacagcatggaggagctcccaggctatgaagagaccctgacccgcctggctgccattctcgccaaacactttgccgacgcacgcattgtgggcactgacatccgagactcactgatgcaggccctggccagctacgtgtgctacccacactccctgcgggctgtggagcgaatccccgaggagcagcgtatcgccatggtgaggaacctcctggcgccctatgagcagcggccctgggcccagaccaactggatcctggtgcggctctggaggggctgtggcttcgggtaccgctatacacggctgccacatctgctgaaaaccaaacttgaggacgccaatttgcccagcctccagaagccctgcccttccaccctgctgcagcagcacatggcggacctcctacagcagggtcctgatgtggcacccagcttcctcaacagcgtcctcaatcagctcaactgggccttctctgaattcattggcatgatccaagagatccagcaggctgctgagcgcctggagcggaactttgtggacagccggcagctcaaggtatgtgccacctgctttgacctctcggtcagcctgctgcgtgtcttggagatgactatcacactggtgcctgagatattccttgactggacccggcctacctctgagatgctgctgcggcgtcttgcacagctgctaaaccaggtgctgaaccgggtgacagctgagaggaacctgtttgatcgtgtggtcaccctacggctgcctggcctagagagcgtggaccactatcccattctggtggcagtgacgggcatcctggtgcagctcctggtgcgtggcccagcctcagagagagagcaagccacatcagtgctcctggcagatccctgcttccagctacgctcaatatgctatctcctgggacagccagagcccccagcacctggcactgctctgccagcccctgaccggaagcgcttctccctgcagagctatgcggattatatcagtgccgatgagctggcccaagtggaacagatgctggcgcacctgacctctgcatctgcccaggcagcagctgcctccctgcccaccagtgaggaggacctctgccccatctgctatgcccaccccatctctgctgtgttccagccctgtggccacaagtcctgcaaagcctgtatcaaccagcacctgatgaacaacaaggactgcttcttctgcaaaaccaccatcgtgtctgtagaggactgggagaagggagccaatacgagtactacctcctcagctgcctag

SEQ ID NO: 10 - protein, 2496 aa, Homo sapiens
MASDSPARSLDEIDLSALRDPAGIFELVELVGNGTYGQVYKGRHVKTGQLAAIKVMDVTGDEEEEIKQEINMLKKYSHHRNIATYYGAFIKKNPPGMDDQLWLVMEFCGAGSVTDLIKNTKGNTLKEEWIAYICREILRGLSHLHQHKVIHRDIKGQNVLLTENAEVKLVDFGVSAQLDRTVGRRNTFIGTPYWMAPEVIACDENPDATYDFKSDLWSLGITAIEMAEGAPPLCDMHPMRALFLIPRNPAPRLKSKKWSKKFQSFIESCLVKNHSQRPATEQLMKHPFIRDQPNERQVRIQLKDHIDRTKKKRGEKDETEYEYSGSEEEEEENDSGEPSSILNLPGESTLRRDFLRLQLANKERSEALRRQQLEQQQRENEEHKRQLLAERQKRIEEQKEQRRRLEEQQRREKELRKQQEREQRRHYEEQMRREEERRRAEHEQEYKRKQLEEQRQAERLQRQLKQERDYLVSLQHQRQEQRPVEKKPLYHYKEGMSPSEKPAWAKEVEERSRLNRQSSPAMPHKVANRISDPNLPPRSESFSISGVQPARTPPMLRPVDPQIPHLVAVKSQGPALTASQSVHEQPTKGLSGFQEALNVTSHRVEMPRQNSDPTSENPPLPTRIEKFDRSSWLRQEEDIPPKVPQRTTSISPALARKNSPGNGSALGPRLGSQPIRASNPDLRRTEPILESPLQRTSSGSSSSSSTPSSQPSSQGGSQPGSQAGSSERTRVRANSKSEGSPVLPHEPAKVKPEESRDITRPSRPADLTALAKELRELRIEETNRPMKKVTDYSSSSEESESSEEEEEDGESETHDGTVAVSDIPRLIPTGAPGSNEQYNVGMVGTHGLETSHADSFSGSISREGTLMIRETSGEKKRSGHSDSNGFAGHINLPDLVQQSHSPAGTPTEGLGRVSTHSQEMDSGTEYGMGSSTKASFTPFVDPRVYQTSPTDEDEEDEESSAAALFTSELLRQEQAKLNEARKISVVNVNPTNIRPHSDTPEIRKYKKRFNSEILCAALWGVNLLVGTENGLMLLDRSGQGKVYNLINRRRFQQMDVLEGLNVLVTISGKKNKLRVYYLSWLRNRILHNDPEVEKKQGWITVGDLEGCIHYKVVKYERIKFLVIALKNAVEIYAWAPKPYHKFMAFKSFADLQHKPLLVDLTVEEGQRLKVIFGSHTGFHVIDVDSGNSYDIYIPSHIQGNITPHAIVILPKTDGMEMLVCYEDEGVYVNTYGRITKDVVLQWGEMPTSVAYIHSNQIMGWGEKAIEIRSVETGHLDGVFMHKRAQRLKFLCERNDKVIGHSNFGTIRSTTCVYKGKWLYEVLISSQGLMQIGWCTISCRFNQEEGVGDTHNSYAYDGNRVRKWNVTTTNYGKAWAAGDIVSCLIDLDDGTLSFCLNGVSLGTAFENLSRGLGMAYFPAISLSFKESVAFNFGSRPLRYPVAGYRPLQDPPSADLVRAQRLLGCFRAVLSVELDPVEGRLLDKESSKWRLRGQPTVLLTLAHIFHHFAPLLRKVYLVEAVLMSFLLGIVEKGTPTQAQSVVHQVLDLLWLFMEDYEVQDCLKQLMMSLLRLYRFSPIVPDLGLQIHYLRLTIAILRHEKSRKFLLSNVLFDVLRSVVFFYIKSPLRVEEAGLQELIPTTWWPHCSSREGKESTEMKEETAEERLRRRAYERGCQRLRKRIEVVEELQVQILKLLLDNKDDNGGEASRYIFLTKFRKFLQENASGRGNMPMLCPPEYMVCFLHRLISALRYYWDEYKASNPHASFSEEAYIPPQVFYNGKVDYFDLQRLGGLLSHLRKTLKDDLASKANIVIDPLELQSTAMDDLDEDEEPAPAMAQRPMQALAVGGPLPLPRPGWLSSPTLGRANRFLSTAAVSLMTPRRPLSTSEKVKVRTLSVEQRTREDIEGSHWNEGLLLGRPPEEPEQPLTENSLLEVLDGAVMMYNLSVHQQLGKMVGVSDDVNEYAMALRDTEDKLRRCPKRRKDILAELTKSQKVFSEKLDHLSRRLAWVHATVYSQEKMLDIYWLLRVCLRTIEHGDRTGSLFAFMPEFYLSVAINSYSALKNYFGPVHSMEELPGYEETLTRLAAILAKHFADARIVGTDIRDSLMQALASYVCYPHSLRAVERIPEEQRIAMVRNLLAPYEQRPWAQTNWILVRLWRGCGFGYRYTRLPHLLKTKLEDANLPSLQKPCPSTLLQQHMADLLQQGPDVAPSFLNSVLNQLNWAFSEFIGMIQEIQQAAERLERNFVDSRQLKVCATCFDLSVSLLRVLEMTITLVPEIFLDWTRPTSEMLLRRLAQLLNQVLNRVTAERNLFDRVVTLRLPGLESVDHYPILVAVTGILVQLLVRGPASEREQATSVLLADPCFQLRSICYLLGQPEPPAPGTALPAPDRKRFSLQSYADYISADELAQVEQMLAHLTSASAQAAAASLPTSEEDLCPICYAHPISAVFQPCGHKSCKACINQHLMNNKDCFFCKTTIVSVEDWEKGANTSTTSSAA

SEQ ID NO: 11 - DNA, 7437 bp, Homo sapiens
  CDS (1)..(7437)
atggcgagcgactccccggctcgaagcctggatgaaatagatctctcggctctgagggaccccgcagggatctttgaattggtggaacttgttggaaatggaacatacgggcaagtttataagggtcgtcatgtcaaaacgggccagcttgcagccatcaaggttatggatgtcacaggggatgaagaggaagaaatcaaacaagaaattaacatgttgaagaaatattctcatcaccggaatattgctacatactatggtgcttttatcaaaaagaacccaccaggcatggatgaccaactttggttggtgatggagttttgtggtgctggctctgtcaccgacctgatcaagaacacaaaaggtaacacgttgaaagaggagtggattgcatacatctgcagggaaatcttacgggggctgagtcacctgcaccagcataaagtgattcatcgagatattaaagggcaaaatgtcttgctgactgaaaatgcagaagttaaactagtggactttggagtcagtgctcagcttgatcgaacagtgggcaggaggaatactttcattggaactccctactggatggcaccagaagttattgcctgtgatgaaaacccagatgccacatatgatttcaagagtgacttgtggtctttgggtatcaccgccattgaaatggcagaaggtgctccccctctctgtgacatgcaccccatgagagctctcttcctcatcccccggaacccagcgcctcggctgaagtctaagaagtggtcaaaaaaattccagtcatttattgagagctgcttggtaaagaatcacagccagcgaccagcaacagaacaattgatgaagcatccatttatacgagaccaacctaatgagcgacaggtccgcattcaactcaaggaccatattgatagaacaaagaagaagcgaggagaaaaagatgagacagagtatgagtacagtggaagtgaggaagaagaggaggagaatgactcaggagagcccagctccatcctgaatctgccaggggagtcgacgctgcggagggactttctgaggctgcagctggccaacaaggagcgttctgaggccctacggaggcagcagctggagcagcagcagcgggagaatgaggagcacaagcggcagctgctggccgagcgtcagaagcgcatcgaggagcagaaagagcagaggcggcggctggaggagcaacaaaggcgagagaaggagctgcggaagcagcaggagagggagcagcgccggcactatgaggagcagatgcgccgggaggaggagaggaggcgtgcggagcatgaacaggaatacatcaggcgacagttagaggaggagcagagacagttagagatcttgcagcagcagctactgcatgaacaagctctacttctggaatataagcgcaaacaattggaagaacagagacaagcagaaagactgcagaggcagctaaagcaagaaagagactacttagtttcccttcagcatcagcggcaggagcagaggcctgtggagaagaagccactgtaccattacaaagaaggaatgagtcctagtgagaagccagcatgggccaaggagatcccacatctggtagctgtaaaatcccagggacctgccttgaccgcctcccagtcagtgcacgagcagcccacaaagggcctctctgggtttcaggaggctctgaacgtgacctcccaccgcgtggagatgccacgccagaactcagatcccacctcggaaaatcctcctctccccactcgcattgaaaagtttgaccgaagctcttggttacgacaggaagaagacattccaccaaaggtgcctcaaagaacaacttctatatccccagcattagccagaaagaattctcctgggaatggtagtgctctgggacccagactaggatctcaacccatcagagcaagcaaccctgatctccggagaactgagcccatcttggagagccccttgcagaggaccagcagtggcagttcctccagctccagcacccctagctcccagcccagctcccaaggaggctcccagcctggatcacaagcaggatccagtgaacgcaccagagttcgagccaacagtaagtcagaaggatcacctgtgctcccccatgagcctgccaaggtgaaaccagaagaatccagggacattacccggcccagtcgaccagctagctacaaaaaagctatagatgaggatctgacggcattagccaaagaactaagagaactccggattgaagaaacaaaccgcccaatgaagaaggtgactgattactcctcctccagtgaggagtcagaaagtagcgaggaagaggaggaagatggagagagcgagacccatgatgggacagtggctgtcagcgacatacccagactgataccaacaggagctccaggcagcaacgagcagtacaatgtgggaatggtggggacgcatgggctggagacctctcatgcggacagtttcagcggcagtatttcaagagaaggaaccttgatgattagagagacgtctggagagaagaagcgatctggccacagtgacagcaatggctttgctggccacatcaacctccctgacctggtgcagcagagccattctccagctggaaccccgactgagggactggggcgcgtctcaacccattcccaggagatggactctgggactgaatatggcatggggagcagcaccaaagcctccttcaccccctttgtggaccccagagtataccagacgtctcccactgatgaagatgaagaggatgaggaatcatcagccgcagctctgtttactagcgaacttcttaggcaagaacaggccaaactcaatgaagcaagaaagatttcggtggtaaatgtaaacccaaccaacattcggcctcatagcgacacaccagaaatcagaaaatacaagaaacgattcaactcagaaatactttgtgcagctctgtggggtgtaaaccttctggtggggactgaaaatggcctgatgcttttggaccgaagtgggcaaggcaaagtctataatctgatcaaccggaggcgatttcagcagatggatgtgctagagggactgaatgtccttgtgacaatttcaggaaagaagaataagctacgagtttactatctttcatggttaagaaacagaatactacataatgacccagaagtagaaaagaaacaaggctggatcactgttggggacttggaaggctgtatacattataaagttgttaaatatgaaaggatcaaatttttggtgattgccttaaagaatgctgtggaaatatatgcttgggctcctaaaccgtatcataaattcatggcatttaagtcttttgcagatctccagcacaagcctctgctagttgatctcacggtagaagaaggtcaaagattaaaggttatttttggttcacacactggtttccatgtaattgatgttgattcaggaaactcttatgatatctacataccatctcatattcagggcaatatcactcctcatgctattgtcatcttgcctaaaacagatggaatggaaatgcttgtttgctatgaggatgagggggtgtatgtaaacacctatggccggataactaaggatgtggtgctccaatggggagaaatgcccacgtctgtggcctacattcattccaatcagataatgggctggggcgagaaagctattgagatccggtcagtggaaacaggacatttggatggagtatttatgcataagcgagctcaaaggttaaagtttctatgtgaaagaaatgataaggtgattggacacagcaactttggcaccatccgctctaccacatgcgtgtacaaagggaaatggctctacgaggtcctcatctcctcccaggggctcatgcagatcggctggtgcaccatcagctgccgcttcaaccaggaggagggggttggagatacacacaactcctatgcctatgatggcaaccgcgtgcgcaagtggaatgtgaccacaacgaattatggcaaggcgtgggcagcgggggacatcgtgagctgcctgattgacctggatgatggcactctgtccttctgcctgaacggtgtatcactgggcactgcctttgagaacctgtccaggggcctgggtatggcctacttcccagccatcagcctctctttcaaggagtccgtggccttcaactttggcagccgtcctctgcgctacccagtggcaggctaccggcccctgcaggacccaccgagtgctgacctggtgcgggcacagaggttgctgggctgcttccgggcagtgctgagtgtggagctggaccctgtggaggggcggctgttggacaaggagagctccaagtggcggttgcggggccagcccaccgtcctcctcacactggcccacatcttccatcactttgcaccgcttctgcgcaaggtgtatctggtggaggctgtgctcatgagcttcttgctgggcatcgtggagaagggcacacccacacaggcacagtccgtggtgcaccaggtcctggacctcttgtggctcttcatggaggactacgaggtacaagattgcctcaagcagttgatgatgtctctgcttcggctgtaccgattctcacccattgtcccagacctgggcctacagatccattacctgcggctcactatcgccatcctgaggcatgagaagtcccgcaagtttctgcttagcaatgtcctcttcgacgtgctccgctccgtcgtcttcttttacatcaagagccccctgcgtgtggaggaggccggcctgcaggagctcattcccaccacctggtggccccactgctccagtagggagggcaaagagagcacggagatgaaggaggagaccgcagaggagcggctgcggcggcgagcctacgaacggggctgtcagcggctcaggaagcgcatcgaagtggtggaagaactacaggtccagatcctgaagctgctgctggacaataaagatgacaatgggggtgaagcttctaggtatatcttcctgaccaagtttcgcaagtttctgcaggagaacgccagtggccgggggaacatgcccatgctctgcccccctgagtacatggtctgcttcttacaccggctgatctctgccctgcgctactattgggatgaatacaaggcttccaatcctcatgcttccttcagtgaggaggcctacatcccgccccaggtcttctataatggcaaggtggactactttgacctgcagcgcctggggggcctcctctcgcacctgcggaagaccctcaaagatgaccttgcttccaaagccaacattgtgatcgacccactggagctccagtcaaccgccatggatgacctagatgaggatgaggagccagccccagctatggcccagcgccccatgcaggccctggctgttggggggccactgcccctgccccggcccggctggctcagttctccaactttgggccgagccaaccgcttcctcagcacagcggctgtgagcctcatgaccccacggcggcctctgagcacctcggagaaagtgaaggtccgcacgctgagcgtggagcagaggacccgtgaggacattgaaggcagccactggaatgagggcttgctgctggggcggccccccgaggagcctgagcagcccctcaccgagaactcgctgctggaagtcctggatggggcggtcatgatgtacaacctcagcgtacaccagcagctgggcaagatggtgggtgtctccgatgatgtcaatgaatacgctatggctctgagggacacagaggacaagctccgccggtgccccaagaggaggaaggacatccttgcagagttgaccaagagccagaaggttttctcagaaaagctggaccacctgagccgccgtcttgcctgggtccatgccactgtctactcccaggagaagatgctggacatctactggctgctgcgcgtctgcctgcggaccattgagcacggtgatcgcacagggtctctctttgccttcatgcccgagttctacctgagcgtggccatcaacagctacagtgctctcaagaattactttggtcccgtgcacagcatggaggagctcccaggctatgaagagaccctgacccgcctggctgccattctcgccaaacactttgccgacgcacgcattgtgggcactgacatccgagactcactgatgcaggccctggccagctacgtgtgctacccacactccctgcgggctgtggagcgaatccccgaggagcagcgtatcgccatggtgaggaacctcctggcgccctatgagcagcggccctgggcccagaccaactggatcctggtgcggctctggaggggctgtggcttcgggtaccgctatacacggctgccacatctgctgaaaaccaaacttgaggacgccaatttgcccagcctccagaagccctgcccttccaccctgctgcagcagcacatggcggacctcctacagcagggtcctgatgtggcacccagcttcctcaacagcgtcctcaatcagctcaactgggccttctctgaattcattggcatgatccaagagatccagcaggctgctgagcgcctggagcggaactttgtggacagccggcagctcaaggtatgtgccacctgctttgacctctcggtcagcctgctgcgtgtcttggagatgactatcacactggtgcctgagatattccttgactggacccggcctacctctgagatgctgctgcggcgtcttgcacagctgctaaaccaggtgctgaaccgggtgacagctgagaggaacctgtttgatcgtgtggtcaccctacggctgcctggcctagagagcgtggaccactatcccattctggtggcagtgacgggcatcctggtgcagctcctggtgcgtggcccagcctcagagagagagcaagccacatcagtgctcctggcagatccctgcttccagctacgctcaatatgctatctcctgggacagccagagcccccagcacctggcactgctctgccagcccctgaccggaagcgcttctccctgcagagctatgcggattatatcagtgccgatgagctggcccaagtggaacagatgctggcgcacctgacctctgcatctgcccaggcagcagctgcctccctgcccaccagtgaggaggacctctgccccatctgctatgcccaccccatctctgctgtgttccagccctgtggccacaagtcctgcaaagcctgtatcaaccagcacctgatgaacaacaaggactgcttcttctgcaaaaccaccatcgtgtctgtagaggactgggagaagggagccaatacgagtactacctcctcagctgcctag

SEQ ID NO: 12 - protein, 2478 aa, Homo sapiens
MASDSPARSLDEIDLSALRDPAGIFELVELVGNGTYGQVYKGRHVKTGQLAAIKVMDVTGDEEEEIKQEINMLKKYSHHRNIATYYGAFIKKNPPGMDDQLWLVMEFCGAGSVTDLIKNTKGNTLKEEWIAYICREILRGLSHLHQHKVIHRDIKGQNVLLTENAEVKLVDFGVSAQLDRTVGRRNTFIGTPYWMAPEVIACDENPDATYDFKSDLWSLGITAIEMAEGAPPLCDMHPMRALFLIPRNPAPRLKSKKWSKKFQSFIESCLVKNHSQRPATEQLMKHPFIRDQPNERQVRIQLKDHIDRTKKKRGEKDETEYEYSGSEEEEEENDSGEPSSILNLPGESTLRRDFLRLQLANKERSEALRRQQLEQQQRENEEHKRQLLAERQKRIEEQKEQRRRLEEQQRREKELRKQQEREQRRHYEEQMRREEERRRAEHEQEYIRRQLEEEQRQLEILQQQLLHEQALLLEYKRKQLEEQRQAERLQRQLKQERDYLVSLQHQRQEQRPVEKKPLYHYKEGMSPSEKPAWAKEIPHLVAVKSQGPALTASQSVHEQPTKGLSGFQEALNVTSHRVEMPRQNSDPTSENPPLPTRIEKFDRSSWLRQEEDIPPKVPQRTTSISPALARKNSPGNGSALGPRLGSQPIRASNPDLRRTEPILESPLQRTSSGSSSSSSTPSSQPSSQGGSQPGSQAGSSERTRVRANSKSEGSPVLPHEPAKVKPEESRDITRPSRPASYKKAIDEDLTALAKELRELRIEETNRPMKKVTDYSSSSEESESSEEEEEDGESETHDGTVAVSDIPRLIPTGAPGSNEQYNVGMVGTHGLETSHADSFSGSISREGTLMIRETSGEKKRSGHSDSNGFAGHINLPDLVQQSHSPAGTPTEGLGRVSTHSQEMDSGTEYGMGSSTKASFTPFVDPRVYQTSPTDEDEEDEESSAAALFTSELLRQEQAKLNEARKISVVNVNPTNIRPHSDTPEIRKYKKRFNSEILCAALWGVNLLVGTENGLMLLDRSGQGKVYNLINRRRFQQMDVLEGLNVLVTISGKKNKLRVYYLSWLRNRILHNDPEVEKKQGWITVGDLEGCIHYKVVKYERIKFLVIALKNAVEIYAWAPKPYHKFMAFKSFADLQHKPLLVDLTVEEGQRLKVIFGSHTGFHVIDVDSGNSYDIYIPSHIQGNITPHAIVILPKTDGMEMLVCYEDEGVYVNTYGRITKDVVLQWGEMPTSVAYIHSNQIMGWGEKAIEIRSVETGHLDGVFMHKRAQRLKFLCERNDKVIGHSNFGTIRSTTCVYKGKWLYEVLISSQGLMQIGWCTISCRFNQEEGVGDTHNSYAYDGNRVRKWNVTTTNYGKAWAAGDIVSCLIDLDDGTLSFCLNGVSLGTAFENLSRGLGMAYFPAISLSFKESVAFNFGSRPLRYPVAGYRPLQDPPSADLVRAQRLLGCFRAVLSVELDPVEGRLLDKESSKWRLRGQPTVLLTLAHIFHHFAPLLRKVYLVEAVLMSFLLGIVEKGTPTQAQSVVHQVLDLLWLFMEDYEVQDCLKQLMMSLLRLYRFSPIVPDLGLQIHYLRLTIAILRHEKSRKFLLSNVLFDVLRSVVFFYIKSPLRVEEAGLQELIPTTWWPHCSSREGKESTEMKEETAEERLRRRAYERGCQRLRKRIEVVEELQVQILKLLLDNKDDNGGEASRYIFLTKFRKFLQENASGRGNMPMLCPPEYMVCFLHRLISALRYYWDEYKASNPHASFSEEAYIPPQVFYNGKVDYFDLQRLGGLLSHLRKTLKDDLASKANIVIDPLELQSTAMDDLDEDEEPAPAMAQRPMQALAVGGPLPLPRPGWLSSPTLGRANRFLSTAAVSLMTPRRPLSTSEKVKVRTLSVEQRTREDIEGSHWNEGLLLGRPPEEPEQPLTENSLLEVLDGAVMMYNLSVHQQLGKMVGVSDDVNEYAMALRDTEDKLRRCPKRRKDILAELTKSQKVFSEKLDHLSRRLAWVHATVYSQEKMLDIYWLLRVCLRTIEHGDRTGSLFAFMPEFYLSVAINSYSALKNYFGPVHSMEELPGYEETLTRLAAILAKHFADARIVGTDIRDSLMQALASYVCYPHSLRAVERIPEEQRIAMVRNLLAPYEQRPWAQTNWILVRLWRGCGFGYRYTRLPHLLKTKLEDANLPSLQKPCPSTLLQQHMADLLQQGPDVAPSFLNSVLNQLNWAFSEFIGMIQEIQQAAERLERNFVDSRQLKVCATCFDLSVSLLRVLEMTITLVPEIFLDWTRPTSEMLLRRLAQLLNQVLNRVTAERNLFDRVVTLRLPGLESVDHYPILVAVTGILVQLLVRGPASEREQATSVLLADPCFQLRSICYLLGQPEPPAPGTALPAPDRKRFSLQSYADYISADELAQVEQMLAHLTSASAQAAAASLPTSEEDLCPICYAHPISAVFQPCGHKSCKACINQHLMNNKDCFFCKTTIVSVEDWEKGANTSTTSSAA

SEQ ID NO: 13 - DNA, 7413 bp, Homo sapiens
  CDS (1)..(7413)
atggcgagcgactccccggctcgaagcctggatgaaatagatctctcggctctgagggaccccgcagggatctttgaattggtggaacttgttggaaatggaacatacgggcaagtttataagggtcgtcatgtcaaaacgggccagcttgcagccatcaaggttatggatgtcacaggggatgaagaggaagaaatcaaacaagaaattaacatgttgaagaaatattctcatcaccggaatattgctacatactatggtgcttttatcaaaaagaacccaccaggcatggatgaccaactttggttggtgatggagttttgtggtgctggctctgtcaccgacctgatcaagaacacaaaaggtaacacgttgaaagaggagtggattgcatacatctgcagggaaatcttacgggggctgagtcacctgcaccagcataaagtgattcatcgagatattaaagggcaaaatgtcttgctgactgaaaatgcagaagttaaactagtggactttggagtcagtgctcagcttgatcgaacagtgggcaggaggaatactttcattggaactccctactggatggcaccagaagttattgcctgtgatgaaaacccagatgccacatatgatttcaagagtgacttgtggtctttgggtatcaccgccattgaaatggcagaaggtgctccccctctctgtgacatgcaccccatgagagctctcttcctcatcccccggaacccagcgcctcggctgaagtctaagaagtggtcaaaaaaattccagtcatttattgagagctgcttggtaaagaatcacagccagcgaccagcaacagaacaattgatgaagcatccatttatacgagaccaacctaatgagcgacaggtccgcattcaactcaaggaccatattgatagaacaaagaagaagcgaggagaaaaagatgagacagagtatgagtacagtggaagtgaggaagaagaggaggagaatgactcaggagagcccagctccatcctgaatctgccaggggagtcgacgctgcggagggactttctgaggctgcagctggccaacaaggagcgttctgaggccctacggaggcagcagctggagcagcagcagcgggagaatgaggagcacaagcggcagctgctggccgagcgtcagaagcgcatcgaggagcagaaagagcagaggcggcggctggaggagcaacaaaggcgagagaaggagctgcggaagcagcaggagagggagcagcgccggcactatgaggagcagatgcgccgggaggaggagaggaggcgtgcggagcatgaacaggaatacatcaggcgacagttagaggaggagcagagacagttagagatcttgcagcagcagctactgcatgaacaagctctacttctggaatataagcgcaaacaattggaagaacagagacaagcagaaagactgcagaggcagctaaagcaagaaagagactacttagtttcccttcagcatcagcggcaggagcagaggcctgtggagaagaagccactgtaccattacaaagaaggaatgagtcctagtgagaagccagcatgggccaaggagatcccacatctggtagctgtaaaatcccagggacctgccttgaccgcctcccagtcagtgcacgagcagcccacaaagggcctctctgggtttcaggaggctctgaacgtgacctcccaccgcgtggagatgccacgccagaactcagatcccacctcggaaaatcctcctctccccactcgcattgaaaagtttgaccgaagctcttggttacgacaggaagaagacattccaccaaaggtgcctcaaagaacaacttctatatccccagcattagccagaaagaattctcctgggaatggtagtgctctgggacccagactaggatctcaacccatcagagcaagcaaccctgatctccggagaactgagcccatcttggagagccccttgcagaggaccagcagtggcagttcctccagctccagcacccctagctcccagcccagctcccaaggaggctcccagcctggatcacaagcaggatccagtgaacgcaccagagttcgagccaacagtaagtcagaaggatcacctgtgctcccccatgagcctgccaaggtgaaaccagaagaatccagggacattacccggcccagtcgaccagctgatctgacggcattagccaaagaactaagagaactccggattgaagaaacaaaccgcccaatgaagaaggtgactgattactcctcctccagtgaggagtcagaaagtagcgaggaagaggaggaagatggagagagcgagacccatgatgggacagtggctgtcagcgacatacccagactgataccaacaggagctccaggcagcaacgagcagtacaatgtgggaatggtggggacgcatgggctggagacctctcatgcggacagtttcagcggcagtatttcaagagaaggaaccttgatgattagagagacgtctggagagaagaagcgatctggccacagtgacagcaatggctttgctggccacatcaacctccctgacctggtgcagcagagccattctccagctggaaccccgactgagggactggggcgcgtctcaacccattcccaggagatggactctgggactgaatatggcatggggagcagcaccaaagcctccttcaccccctttgtggaccccagagtataccagacgtctcccactgatgaagatgaagaggatgaggaatcatcagccgcagctctgtttactagcgaacttcttaggcaagaacaggccaaactcaatgaagcaagaaagatttcggtggtaaatgtaaacccaaccaacattcggcctcatagcgacacaccagaaatcagaaaatacaagaaacgattcaactcagaaatactttgtgcagctctgtggggtgtaaaccttctggtggggactgaaaatggcctgatgcttttggaccgaagtgggcaaggcaaagtctataatctgatcaaccggaggcgatttcagcagatggatgtgctagagggactgaatgtccttgtgacaatttcaggaaagaagaataagctacgagtttactatctttcatggttaagaaacagaatactacataatgacccagaagtagaaaagaaacaaggctggatcactgttggggacttggaaggctgtatacattataaagttgttaaatatgaaaggatcaaatttttggtgattgccttaaagaatgctgtggaaatatatgcttgggctcctaaaccgtatcataaattcatggcatttaagtcttttgcagatctccagcacaagcctctgctagttgatctcacggtagaagaaggtcaaagattaaaggttatttttggttcacacactggtttccatgtaattgatgttgattcaggaaactcttatgatatctacataccatctcatattcagggcaatatcactcctcatgctattgtcatcttgcctaaaacagatggaatggaaatgcttgtttgctatgaggatgagggggtgtatgtaaacacctatggccggataactaaggatgtggtgctccaatggggagaaatgcccacgtctgtggcctacattcattccaatcagataatgggctggggcgagaaagctattgagatccggtcagtggaaacaggacatttggatggagtatttatgcataagcgagctcaaaggttaaagtttctatgtgaaagaaatgataaggtgattggacacagcaactttggcaccatccgctctaccacatgcgtgtacaaagggaaatggctctacgaggtcctcatctcctcccaggggctcatgcagatcggctggtgcaccatcagctgccgcttcaaccaggaggagggggttggagatacacacaactcctatgcctatgatggcaaccgcgtgcgcaagtggaatgtgaccacaacgaattatggcaaggcgtgggcagcgggggacatcgtgagctgcctgattgacctggatgatggcactctgtccttctgcctgaacggtgtatcactgggcactgcctttgagaacctgtccaggggcctgggtatggcctacttcccagccatcagcctctctttcaaggagtccgtggccttcaactttggcagccgtcctctgcgctacccagtggcaggctaccggcccctgcaggacccaccgagtgctgacctggtgcgggcacagaggttgctgggctgcttccgggcagtgctgagtgtggagctggaccctgtggaggggcggctgttggacaaggagagctccaagtggcggttgcggggccagcccaccgtcctcctcacactggcccacatcttccatcactttgcaccgcttctgcgcaaggtgtatctggtggaggctgtgctcatgagcttcttgctgggcatcgtggagaagggcacacccacacaggcacagtccgtggtgcaccaggtcctggacctcttgtggctcttcatggaggactacgaggtacaagattgcctcaagcagttgatgatgtctctgcttcggctgtaccgattctcacccattgtcccagacctgggcctacagatccattacctgcggctcactatcgccatcctgaggcatgagaagtcccgcaagtttctgcttagcaatgtcctcttcgacgtgctccgctccgtcgtcttcttttacatcaagagccccctgcgtgtggaggaggccggcctgcaggagctcattcccaccacctggtggccccactgctccagtagggagggcaaagagagcacggagatgaaggaggagaccgcagaggagcggctgcggcggcgagcctacgaacggggctgtcagcggctcaggaagcgcatcgaagtggtggaagaactacaggtccagatcctgaagctgctgctggacaataaagatgacaatgggggtgaagcttctaggtatatcttcctgaccaagtttcgcaagtttctgcaggagaacgccagtggccgggggaacatgcccatgctctgcccccctgagtacatggtctgcttcttacaccggctgatctctgccctgcgctactattgggatgaatacaaggcttccaatcctcatgcttccttcagtgaggaggcctacatcccgccccaggtcttctataatggcaaggtggactactttgacctgcagcgcctggggggcctcctctcgcacctgcggaagaccctcaaagatgaccttgcttccaaagccaacattgtgatcgacccactggagctccagtcaaccgccatggatgacctagatgaggatgaggagccagccccagctatggcccagcgccccatgcaggccctggctgttggggggccactgcccctgccccggcccggctggctcagttctccaactttgggccgagccaaccgcttcctcagcacagcggctgtgagcctcatgaccccacggcggcctctgagcacctcggagaaagtgaaggtccgcacgctgagcgtggagcagaggacccgtgaggacattgaaggcagccactggaatgagggcttgctgctggggcggccccccgaggagcctgagcagcccctcaccgagaactcgctgctggaagtcctggatggggcggtcatgatgtacaacctcagcgtacaccagcagctgggcaagatggtgggtgtctccgatgatgtcaatgaatacgctatggctctgagggacacagaggacaagctccgccggtgccccaagaggaggaaggacatccttgcagagttgaccaagagccagaaggttttctcagaaaagctggaccacctgagccgccgtcttgcctgggtccatgccactgtctactcccaggagaagatgctggacatctactggctgctgcgcgtctgcctgcggaccattgagcacggtgatcgcacagggtctctctttgccttcatgcccgagttctacctgagcgtggccatcaacagctacagtgctctcaagaattactttggtcccgtgcacagcatggaggagctcccaggctatgaagagaccctgacccgcctggctgccattctcgccaaacactttgccgacgcacgcattgtgggcactgacatccgagactcactgatgcaggccctggccagctacgtgtgctacccacactccctgcgggctgtggagcgaatccccgaggagcagcgtatcgccatggtgaggaacctcctggcgccctatgagcagcggccctgggcccagaccaactggatcctggtgcggctctggaggggctgtggcttcgggtaccgctatacacggctgccacatctgctgaaaaccaaacttgaggacgccaatttgcccagcctccagaagccctgcccttccaccctgctgcagcagcacatggcggacctcctacagcagggtcctgatgtggcacccagcttcctcaacagcgtcctcaatcagctcaactgggccttctctgaattcattggcatgatccaagagatccagcaggctgctgagcgcctggagcggaactttgtggacagccggcagctcaaggtatgtgccacctgctttgacctctcggtcagcctgctgcgtgtcttggagatgactatcacactggtgcctgagatattccttgactggacccggcctacctctgagatgctgctgcggcgtcttgcacagctgctaaaccaggtgctgaaccgggtgacagctgagaggaacctgtttgatcgtgtggtcaccctacggctgcctggcctagagagcgtggaccactatcccattctggtggcagtgacgggcatcctggtgcagctcctggtgcgtggcccagcctcagagagagagcaagccacatcagtgctcctggcagatccctgcttccagctacgctcaatatgctatctcctgggacagccagagcccccagcacctggcactgctctgccagcccctgaccggaagcgcttctccctgcagagctatgcggattatatcagtgccgatgagctggcccaagtggaacagatgctggcgcacctgacctctgcatctgcccaggcagcagctgcctccctgcccaccagtgaggaggacctctgccccatctgctatgcccaccccatctctgctgtgttccagccctgtggccacaagtcctgcaaagcctgtatcaaccagcacctgatgaacaacaaggactgcttcttctgcaaaaccaccatcgtgtctgtagaggactgggagaagggagccaatacgagtactacctcctcagctgcctag

SEQ ID NO: 14 - protein, 2470 aa, Homo sapiens
MASDSPARSLDEIDLSALRDPAGIFELVELVGNGTYGQVYKGRHVKTGQLAAIKVMDVTGDEEEEIKQEINMLKKYSHHRNIATYYGAFIKKNPPGMDDQLWLVMEFCGAGSVTDLIKNTKGNTLKEEWIAYICREILRGLSHLHQHKVIHRDIKGQNVLLTENAEVKLVDFGVSAQLDRTVGRRNTFIGTPYWMAPEVIACDENPDATYDFKSDLWSLGITAIEMAEGAPPLCDMHPMRALFLIPRNPAPRLKSKKWSKKFQSFIESCLVKNHSQRPATEQLMKHPFIRDQPNERQVRIQLKDHIDRTKKKRGEKDETEYEYSGSEEEEEENDSGEPSSILNLPGESTLRRDFLRLQLANKERSEALRRQQLEQQQRENEEHKRQLLAERQKRIEEQKEQRRRLEEQQRREKELRKQQEREQRRHYEEQMRREEERRRAEHEQEYIRRQLEEEQRQLEILQQQLLHEQALLLEYKRKQLEEQRQAERLQRQLKQERDYLVSLQHQRQEQRPVEKKPLYHYKEGMSPSEKPAWAKEIPHLVAVKSQGPALTASQSVHEQPTKGLSGFQEALNVTSHRVEMPRQNSDPTSENPPLPTRIEKFDRSSWLRQEEDIPPKVPQRTTSISPALARKNSPGNGSALGPRLGSQPIRASNPDLRRTEPILESPLQRTSSGSSSSSSTPSSQPSSQGGSQPGSQAGSSERTRVRANSKSEGSPVLPHEPAKVKPEESRDITRPSRPADLTALAKELRELRIEETNRPMKKVTDYSSSSEESESSEEEEEDGESETHDGTVAVSDIPRLIPTGAPGSNEQYNVGMVGTHGLETSHADSFSGSISREGTLMIRETSGEKKRSGHSDSNGFAGHINLPDLVQQSHSPAGTPTEGLGRVSTHSQEMDSGTEYGMGSSTKASFTPFVDPRVYQTSPTDEDEEDEESSAAALFTSELLRQEQAKLNEARKISVVNVNPTNIRPHSDTPEIRKYKKRFNSEILCAALWGVNLLVGTENGLMLLDRSGQGKVYNLINRRRFQQMDVLEGLNVLVTISGKKNKLRVYYLSWLRNRILHNDPEVEKKQGWITVGDLEGCIHYKVVKYERIKFLVIALKNAVEIYAWAPKPYHKFMAFKSFADLQHKPLLVDLTVEEGQRLKVIFGSHTGFHVIDVDSGNSYDIYIPSHIQGNITPHAIVILPKTDGMEMLVCYEDEGVYVNTYGRITKDVVLQWGEMPTSVAYIHSNQIMGWGEKAIEIRSVETGHLDGVFMHKRAQRLKFLCERNDKVIGHSNFGTIRSTTCVYKGKWLYEVLISSQGLMQIGWCTISCRFNQEEGVGDTHNSYAYDGNRVRKWNVTTTNYGKAWAAGDIVSCLIDLDDGTLSFCLNGVSLGTAFENLSRGLGMAYFPAISLSFKESVAFNFGSRPLRYPVAGYRPLQDPPSADLVRAQRLLGCFRAVLSVELDPVEGRLLDKESSKWRLRGQPTVLLTLAHIFHHFAPLLRKVYLVEAVLMSFLLGIVEKGTPTQAQSVVHQVLDLLWLFMEDYEVQDCLKQLMMSLLRLYRFSPIVPDLGLQIHYLRLTIAILRHEKSRKFLLSNVLFDVLRSVVFFYIKSPLRVEEAGLQELIPTTWWPHCSSREGKESTEMKEETAEERLRRRAYERGCQRLRKRIEVVEELQVQILKLLLDNKDDNGGEASRYIFLTKFRKFLQENASGRGNMPMLCPPEYMVCFLHRLISALRYYWDEYKASNPHASFSEEAYIPPQVFYNGKVDYFDLQRLGGLLSHLRKTLKDDLASKANIVIDPLELQSTAMDDLDEDEEPAPAMAQRPMQALAVGGPLPLPRPGWLSSPTLGRANRFLSTAAVSLMTPRRPLSTSEKVKVRTLSVEQRTREDIEGSHWNEGLLLGRPPEEPEQPLTENSLLEVLDGAVMMYNLSVHQQLGKMVGVSDDVNEYAMALRDTEDKLRRCPKRRKDILAELTKSQKVFSEKLDHLSRRLAWVHATVYSQEKMLDIYWLLRVCLRTIEHGDRTGSLFAFMPEFYLSVAINSYSALKNYFGPVHSMEELPGYEETLTRLAAILAKHFADARIVGTDIRDSLMQALASYVCYPHSLRAVERIPEEQRIAMVRNLLAPYEQRPWAQTNWILVRLWRGCGFGYRYTRLPHLLKTKLEDANLPSLQKPCPSTLLQQHMADLLQQGPDVAPSFLNSVLNQLNWAFSEFIGMIQEIQQAAERLERNFVDSRQLKVCATCFDLSVSLLRVLEMTITLVPEIFLDWTRPTSEMLLRRLAQLLNQVLNRVTAERNLFDRVVTLRLPGLESVDHYPILVAVTGILVQLLVRGPASEREQATSVLLADPCFQLRSICYLLGQPEPPAPGTALPAPDRKRFSLQSYADYISADELAQVEQMLAHLTSASAQAAAASLPTSEEDLCPICYAHPISAVFQPCGHKSCKACINQHLMNNKDCFFCKTTIVSVEDWEKGANTSTTSSAA

SEQ ID NO: 15 - DNA, 7350 bp, Homo sapiens
  CDS (1)..(7350)
atggcgagcgactccccggctcgaagcctggatgaaatagatctctcggctctgagggaccccgcagggatctttgaattggtggaacttgttggaaatggaacatacgggcaagtttataagggtcgtcatgtcaaaacgggccagcttgcagccatcaaggttatggatgtcacaggggatgaagaggaagaaatcaaacaagaaattaacatgttgaagaaatattctcatcaccggaatattgctacatactatggtgcttttatcaaaaagaacccaccaggcatggatgaccaactttggttggtgatggagttttgtggtgctggctctgtcaccgacctgatcaagaacacaaaaggtaacacgttgaaagaggagtggattgcatacatctgcagggaaatcttacgggggctgagtcacctgcaccagcataaagtgattcatcgagatattaaagggcaaaatgtcttgctgactgaaaatgcagaagttaaactagtggactttggagtcagtgctcagcttgatcgaacagtgggcaggaggaatactttcattggaactccctactggatggcaccagaagttattgcctgtgatgaaaacccagatgccacatatgatttcaagagtgacttgtggtctttgggtatcaccgccattgaaatggcagaaggtgctccccctctctgtgacatgcaccccatgagagctctcttcctcatcccccggaacccagcgcctcggctgaagtctaagaagtggtcaaaaaaattccagtcatttattgagagctgcttggtaaagaatcacagccagcgaccagcaacagaacaattgatgaagcatccatttatacgagaccaacctaatgagcgacaggtccgcattcaactcaaggaccatattgatagaacaaagaagaagcgaggagaaaaagatgagacagagtatgagtacagtggaagtgaggaagaagaggaggagaatgactcaggagagcccagctccatcctgaatctgccaggggagtcgacgctgcggagggactttctgaggctgcagctggccaacaaggagcgttctgaggccctacggaggcagcagctggagcagcagcagcgggagaatgaggagcacaagcggcagctgctggccgagcgtcagaagcgcatcgaggagcagaaagagcagaggcggcggctggaggagcaacaaaggcgagagaaggagctgcggaagcagcaggagagggagcagcgccggcactatgaggagcagatgcgccgggaggaggagaggaggcgtgcggagcatgaacaggaatataagcgcaaacaattggaagaacagagacaagcagaaagactgcagaggcagctaaagcaagaaagagactacttagtttcccttcagcatcagcggcaggagcagaggcctgtggagaagaagccactgtaccattacaaagaaggaatgagtcctagtgagaagccagcatgggccaaggagatcccacatctggtagctgtaaaatcccagggacctgccttgaccgcctcccagtcagtgcacgagcagcccacaaagggcctctctgggtttcaggaggctctgaacgtgacctcccaccgcgtggagatgccacgccagaactcagatcccacctcggaaaatcctcctctccccactcgcattgaaaagtttgaccgaagctcttggttacgacaggaagaagacattccaccaaaggtgcctcaaagaacaacttctatatccccagcattagccagaaagaattctcctgggaatggtagtgctctgggacccagactaggatctcaacccatcagagcaagcaaccctgatctccggagaactgagcccatcttggagagccccttgcagaggaccagcagtggcagttcctccagctccagcacccctagctcccagcccagctcccaaggaggctcccagcctggatcacaagcaggatccagtgaacgcaccagagttcgagccaacagtaagtcagaaggatcacctgtgctcccccatgagcctgccaaggtgaaaccagaagaatccagggacattacccggcccagtcgaccagctagctacaaaaaagctatagatgaggatctgacggcattagccaaagaactaagagaactccggattgaagaaacaaaccgcccaatgaagaaggtgactgattactcctcctccagtgaggagtcagaaagtagcgaggaagaggaggaagatggagagagcgagacccatgatgggacagtggctgtcagcgacatacccagactgataccaacaggagctccaggcagcaacgagcagtacaatgtgggaatggtggggacgcatgggctggagacctctcatgcggacagtttcagcggcagtatttcaagagaaggaaccttgatgattagagagacgtctggagagaagaagcgatctggccacagtgacagcaatggctttgctggccacatcaacctccctgacctggtgcagcagagccattctccagctggaaccccgactgagggactggggcgcgtctcaacccattcccaggagatggactctgggactgaatatggcatggggagcagcaccaaagcctccttcaccccctttgtggaccccagagtataccagacgtctcccactgatgaagatgaagaggatgaggaatcatcagccgcagctctgtttactagcgaacttcttaggcaagaacaggccaaactcaatgaagcaagaaagatttcggtggtaaatgtaaacccaaccaacattcggcctcatagcgacacaccagaaatcagaaaatacaagaaacgattcaactcagaaatactttgtgcagctctgtggggtgtaaaccttctggtggggactgaaaatggcctgatgcttttggaccgaagtgggcaaggcaaagtctataatctgatcaaccggaggcgatttcagcagatggatgtgctagagggactgaatgtccttgtgacaatttcaggaaagaagaataagctacgagtttactatctttcatggttaagaaacagaatactacataatgacccagaagtagaaaagaaacaaggctggatcactgttggggacttggaaggctgtatacattataaagttgttaaatatgaaaggatcaaatttttggtgattgccttaaagaatgctgtggaaatatatgcttgggctcctaaaccgtatcataaattcatggcatttaagtcttttgcagatctccagcacaagcctctgctagttgatctcacggtagaagaaggtcaaagattaaaggttatttttggttcacacactggtttccatgtaattgatgttgattcaggaaactcttatgatatctacataccatctcatattcagggcaatatcactcctcatgctattgtcatcttgcctaaaacagatggaatggaaatgcttgtttgctatgaggatgagggggtgtatgtaaacacctatggccggataactaaggatgtggtgctccaatggggagaaatgcccacgtctgtggcctacattcattccaatcagataatgggctggggcgagaaagctattgagatccggtcagtggaaacaggacatttggatggagtatttatgcataagcgagctcaaaggttaaagtttctatgtgaaagaaatgataaggtgattggacacagcaactttggcaccatccgctctaccacatgcgtgtacaaagggaaatggctctacgaggtcctcatctcctcccaggggctcatgcagatcggctggtgcaccatcagctgccgcttcaaccaggaggagggggttggagatacacacaactcctatgcctatgatggcaaccgcgtgcgcaagtggaatgtgaccacaacgaattatggcaaggcgtgggcagcgggggacatcgtgagctgcctgattgacctggatgatggcactctgtccttctgcctgaacggtgtatcactgggcactgcctttgagaacctgtccaggggcctgggtatggcctacttcccagccatcagcctctctttcaaggagtccgtggccttcaactttggcagccgtcctctgcgctacccagtggcaggctaccggcccctgcaggacccaccgagtgctgacctggtgcgggcacagaggttgctgggctgcttccgggcagtgctgagtgtggagctggaccctgtggaggggcggctgttggacaaggagagctccaagtggcggttgcggggccagcccaccgtcctcctcacactggcccacatcttccatcactttgcaccgcttctgcgcaaggtgtatctggtggaggctgtgctcatgagcttcttgctgggcatcgtggagaagggcacacccacacaggcacagtccgtggtgcaccaggtcctggacctcttgtggctcttcatggaggactacgaggtacaagattgcctcaagcagttgatgatgtctctgcttcggctgtaccgattctcacccattgtcccagacctgggcctacagatccattacctgcggctcactatcgccatcctgaggcatgagaagtcccgcaagtttctgcttagcaatgtcctcttcgacgtgctccgctccgtcgtcttcttttacatcaagagccccctgcgtgtggaggaggccggcctgcaggagctcattcccaccacctggtggccccactgctccagtagggagggcaaagagagcacggagatgaaggaggagaccgcagaggagcggctgcggcggcgagcctacgaacggggctgtcagcggctcaggaagcgcatcgaagtggtggaagaactacaggtccagatcctgaagctgctgctggacaataaagatgacaatgggggtgaagcttctaggtatatcttcctgaccaagtttcgcaagtttctgcaggagaacgccagtggccgggggaacatgcccatgctctgcccccctgagtacatggtctgcttcttacaccggctgatctctgccctgcgctactattgggatgaatacaaggcttccaatcctcatgcttccttcagtgaggaggcctacatcccgccccaggtcttctataatggcaaggtggactactttgacctgcagcgcctggggggcctcctctcgcacctgcggaagaccctcaaagatgaccttgcttccaaagccaacattgtgatcgacccactggagctccagtcaaccgccatggatgacctagatgaggatgaggagccagccccagctatggcccagcgccccatgcaggccctggctgttggggggccactgcccctgccccggcccggctggctcagttctccaactttgggccgagccaaccgcttcctcagcacagcggctgtgagcctcatgaccccacggcggcctctgagcacctcggagaaagtgaaggtccgcacgctgagcgtggagcagaggacccgtgaggacattgaaggcagccactggaatgagggcttgctgctggggcggccccccgaggagcctgagcagcccctcaccgagaactcgctgctggaagtcctggatggggcggtcatgatgtacaacctcagcgtacaccagcagctgggcaagatggtgggtgtctccgatgatgtcaatgaatacgctatggctctgagggacacagaggacaagctccgccggtgccccaagaggaggaaggacatccttgcagagttgaccaagagccagaaggttttctcagaaaagctggaccacctgagccgccgtcttgcctgggtccatgccactgtctactcccaggagaagatgctggacatctactggctgctgcgcgtctgcctgcggaccattgagcacggtgatcgcacagggtctctctttgccttcatgcccgagttctacctgagcgtggccatcaacagctacagtgctctcaagaattactttggtcccgtgcacagcatggaggagctcccaggctatgaagagaccctgacccgcctggctgccattctcgccaaacactttgccgacgcacgcattgtgggcactgacatccgagactcactgatgcaggccctggccagctacgtgtgctacccacactccctgcgggctgtggagcgaatccccgaggagcagcgtatcgccatggtgaggaacctcctggcgccctatgagcagcggccctgggcccagaccaactggatcctggtgcggctctggaggggctgtggcttcgggtaccgctatacacggctgccacatctgctgaaaaccaaacttgaggacgccaatttgcccagcctccagaagccctgcccttccaccctgctgcagcagcacatggcggacctcctacagcagggtcctgatgtggcacccagcttcctcaacagcgtcctcaatcagctcaactgggccttctctgaattcattggcatgatccaagagatccagcaggctgctgagcgcctggagcggaactttgtggacagccggcagctcaaggtatgtgccacctgctttgacctctcggtcagcctgctgcgtgtcttggagatgactatcacactggtgcctgagatattccttgactggacccggcctacctctgagatgctgctgcggcgtcttgcacagctgctaaaccaggtgctgaaccgggtgacagctgagaggaacctgtttgatcgtgtggtcaccctacggctgcctggcctagagagcgtggaccactatcccattctggtggcagtgacgggcatcctggtgcagctcctggtgcgtggcccagcctcagagagagagcaagccacatcagtgctcctggcagatccctgcttccagctacgctcaatatgctatctcctgggacagccagagcccccagcacctggcactgctctgccagcccctgaccggaagcgcttctccctgcagagctatgcggattatatcagtgccgatgagctggcccaagtggaacagatgctggcgcacctgacctctgcatctgcccaggcagcagctgcctccctgcccaccagtgaggaggacctctgccccatctgctatgcccaccccatctctgctgtgttccagccctgtggccacaagtcctgcaaagcctgtatcaaccagcacctgatgaacaacaaggactgcttcttctgcaaaaccaccatcgtgtctgtagaggactgggagaagggagccaatacgagtactacctcctcagctgcctag

SEQ ID NO: 16 - protein, 2449 aa, Homo sapiens
MASDSPARSLDEIDLSALRDPAGIFELVELVGNGTYGQVYKGRHVKTGQLAAIKVMDVTGDEEEEIKQEINMLKKYSHHRNIATYYGAFIKKNPPGMDDQLWLVMEFCGAGSVTDLIKNTKGNTLKEEWIAYICREILRGLSHLHQHKVIHRDIKGQNVLLTENAEVKLVDFGVSAQLDRTVGRRNTFIGTPYWMAPEVIACDENPDATYDFKSDLWSLGITAIEMAEGAPPLCDMHPMRALFLIPRNPAPRLKSKKWSKKFQSFIESCLVKNHSQRPATEQLMKHPFIRDQPNERQVRIQLKDHIDRTKKKRGEKDETEYEYSGSEEEEEENDSGEPSSILNLPGESTLRRDFLRLQLANKERSEALRRQQLEQQQRENEEHKRQLLAERQKRIEEQKEQRRRLEEQQRREKELRKQQEREQRRHYEEQMRREEERRRAEHEQEYKRKQLEEQRQAERLQRQLKQERDYLVSLQHQRQEQRPVEKKPLYHYKEGMSPSEKPAWAKEIPHLVAVKSQGPALTASQSVHEQPTKGLSGFQEALNVTSHRVEMPRQNSDPTSENPPLPTRIEKFDRSSWLRQEEDIPPKVPQRTTSISPALARKNSPGNGSALGPRLGSQPIRASNPDLRRTEPILESPLQRTSSGSSSSSSTPSSQPSSQGGSQPGSQAGSSERTRVRANSKSEGSPVLPHEPAKVKPEESRDITRPSRPASYKKAIDEDLTALAKELRELRIEETNRPMKKVTDYSSSSEESESSEEEEEDGESETHDGTVAVSDIPRLIPTGAPGSNEQYNVGMVGTHGLETSHADSFSGSISREGTLMIRETSGEKKRSGHSDSNGFAGHINLPDLVQQSHSPAGTPTEGLGRVSTHSQEMDSGTEYGMGSSTKASFTPFVDPRVYQTSPTDEDEEDEESSAAALFTSELLRQEQAKLNEARKISVVNVNPTNIRPHSDTPEIRKYKKRFNSEILCAALWGVNLLVGTENGLMLLDRSGQGKVYNLINRRRFQQMDVLEGLNVLVTISGKKNKLRVYYLSWLRNRILHNDPEVEKKQGWITVGDLEGCIHYKVVKYERIKFLVIALKNAVEIYAWAPKPYHKFMAFKSFADLQHKPLLVDLTVEEGQRLKVIFGSHTGFHVIDVDSGNSYDIYIPSHIQGNITPHAIVILPKTDGMEMLVCYEDEGVYVNTYGRITKDVVLQWGEMPTSVAYIHSNQIMGWGEKAIEIRSVETGHLDGVFMHKRAQRLKFLCERNDKVIGHSNFGTIRSTTCVYKGKWLYEVLISSQGLMQIGWCTISCRFNQEEGVGDTHNSYAYDGNRVRKWNVTTTNYGKAWAAGDIVSCLIDLDDGTLSFCLNGVSLGTAFENLSRGLGMAYFPAISLSFKESVAFNFGSRPLRYPVAGYRPLQDPPSADLVRAQRLLGCFRAVLSVELDPVEGRLLDKESSKWRLRGQPTVLLTLAHIFHHFAPLLRKVYLVEAVLMSFLLGIVEKGTPTQAQSVVHQVLDLLWLFMEDYEVQDCLKQLMMSLLRLYRFSPIVPDLGLQIHYLRLTIAILRHEKSRKFLLSNVLFDVLRSVVFFYIKSPLRVEEAGLQELIPTTWWPHCSSREGKESTEMKEETAEERLRRRAYERGCQRLRKRIEVVEELQVQILKLLLDNKDDNGGEASRYIFLTKFRKFLQENASGRGNMPMLCPPEYMVCFLHRLISALRYYWDEYKASNPHASFSEEAYIPPQVFYNGKVDYFDLQRLGGLLSHLRKTLKDDLASKANIVIDPLELQSTAMDDLDEDEEPAPAMAQRPMQALAVGGPLPLPRPGWLSSPTLGRANRFLSTAAVSLMTPRRPLSTSEKVKVRTLSVEQRTREDIEGSHWNEGLLLGRPPEEPEQPLTENSLLEVLDGAVMMYNLSVHQQLGKMVGVSDDVNEYAMALRDTEDKLRRCPKRRKDILAELTKSQKVFSEKLDHLSRRLAWVHATVYSQEKMLDIYWLLRVCLRTIEHGDRTGSLFAFMPEFYLSVAINSYSALKNYFGPVHSMEELPGYEETLTRLAAILAKHFADARIVGTDIRDSLMQALASYVCYPHSLRAVERIPEEQRIAMVRNLLAPYEQRPWAQTNWILVRLWRGCGFGYRYTRLPHLLKTKLEDANLPSLQKPCPSTLLQQHMADLLQQGPDVAPSFLNSVLNQLNWAFSEFIGMIQEIQQAAERLERNFVDSRQLKVCATCFDLSVSLLRVLEMTITLVPEIFLDWTRPTSEMLLRRLAQLLNQVLNRVTAERNLFDRVVTLRLPGLESVDHYPILVAVTGILVQLLVRGPASEREQATSVLLADPCFQLRSICYLLGQPEPPAPGTALPAPDRKRFSLQSYADYISADELAQVEQMLAHLTSASAQAAAASLPTSEEDLCPICYAHPISAVFQPCGHKSCKACINQHLMNNKDCFFCKTTIVSVEDWEKGANTSTTSSAA

SEQ ID NO: 17 - DNA, 7326 bp, Homo sapiens
  CDS (1)..(7326)
atggcgagcgactccccggctcgaagcctggatgaaatagatctctcggctctgagggaccccgcagggatctttgaattggtggaacttgttggaaatggaacatacgggcaagtttataagggtcgtcatgtcaaaacgggccagcttgcagccatcaaggttatggatgtcacaggggatgaagaggaagaaatcaaacaagaaattaacatgttgaagaaatattctcatcaccggaatattgctacatactatggtgcttttatcaaaaagaacccaccaggcatggatgaccaactttggttggtgatggagttttgtggtgctggctctgtcaccgacctgatcaagaacacaaaaggtaacacgttgaaagaggagtggattgcatacatctgcagggaaatcttacgggggctgagtcacctgcaccagcataaagtgattcatcgagatattaaagggcaaaatgtcttgctgactgaaaatgcagaagttaaactagtggactttggagtcagtgctcagcttgatcgaacagtgggcaggaggaatactttcattggaactccctactggatggcaccagaagttattgcctgtgatgaaaacccagatgccacatatgatttcaagagtgacttgtggtctttgggtatcaccgccattgaaatggcagaaggtgctccccctctctgtgacatgcaccccatgagagctctcttcctcatcccccggaacccagcgcctcggctgaagtctaagaagtggtcaaaaaaattccagtcatttattgagagctgcttggtaaagaatcacagccagcgaccagcaacagaacaattgatgaagcatccatttatacgagaccaacctaatgagcgacaggtccgcattcaactcaaggaccatattgatagaacaaagaagaagcgaggagaaaaagatgagacagagtatgagtacagtggaagtgaggaagaagaggaggagaatgactcaggagagcccagctccatcctgaatctgccaggggagtcgacgctgcggagggactttctgaggctgcagctggccaacaaggagcgttctgaggccctacggaggcagcagctggagcagcagcagcgggagaatgaggagcacaagcggcagctgctggccgagcgtcagaagcgcatcgaggagcagaaagagcagaggcggcggctggaggagcaacaaaggcgagagaaggagctgcggaagcagcaggagagggagcagcgccggcactatgaggagcagatgcgccgggaggaggagaggaggcgtgcggagcatgaacaggaatataagcgcaaacaattggaagaacagagacaagcagaaagactgcagaggcagctaaagcaagaaagagactacttagtttcccttcagcatcagcggcaggagcagaggcctgtggagaagaagccactgtaccattacaaagaaggaatgagtcctagtgagaagccagcatgggccaaggagatcccacatctggtagctgtaaaatcccagggacctgccttgaccgcctcccagtcagtgcacgagcagcccacaaagggcctctctgggtttcaggaggctctgaacgtgacctcccaccgcgtggagatgccacgccagaactcagatcccacctcggaaaatcctcctctccccactcgcattgaaaagtttgaccgaagctcttggttacgacaggaagaagacattccaccaaaggtgcctcaaagaacaacttctatatccccagcattagccagaaagaattctcctgggaatggtagtgctctgggacccagactaggatctcaacccatcagagcaagcaaccctgatctccggagaactgagcccatcttggagagccccttgcagaggaccagcagtggcagttcctccagctccagcacccctagctcccagcccagctcccaaggaggctcccagcctggatcacaagcaggatccagtgaacgcaccagagttcgagccaacagtaagtcagaaggatcacctgtgctcccccatgagcctgccaaggtgaaaccagaagaatccagggacattacccggcccagtcgaccagctgatctgacggcattagccaaagaactaagagaactccggattgaagaaacaaaccgcccaatgaagaaggtgactgattactcctcctccagtgaggagtcagaaagtagcgaggaagaggaggaagatggagagagcgagacccatgatgggacagtggctgtcagcgacatacccagactgataccaacaggagctccaggcagcaacgagcagtacaatgtgggaatggtggggacgcatgggctggagacctctcatgcggacagtttcagcggcagtatttcaagagaaggaaccttgatgattagagagacgtctggagagaagaagcgatctggccacagtgacagcaatggctttgctggccacatcaacctccctgacctggtgcagcagagccattctccagctggaaccccgactgagggactggggcgcgtctcaacccattcccaggagatggactctgggactgaatatggcatggggagcagcaccaaagcctccttcaccccctttgtggaccccagagtataccagacgtctcccactgatgaagatgaagaggatgaggaatcatcagccgcagctctgtttactagcgaacttcttaggcaagaacaggccaaactcaatgaagcaagaaagatttcggtggtaaatgtaaacccaaccaacattcggcctcatagcgacacaccagaaatcagaaaatacaagaaacgattcaactcagaaatactttgtgcagctctgtggggtgtaaaccttctggtggggactgaaaatggcctgatgcttttggaccgaagtgggcaaggcaaagtctataatctgatcaaccggaggcgatttcagcagatggatgtgctagagggactgaatgtccttgtgacaatttcaggaaagaagaataagctacgagtttactatctttcatggttaagaaacagaatactacataatgacccagaagtagaaaagaaacaaggctggatcactgttggggacttggaaggctgtatacattataaagttgttaaatatgaaaggatcaaatttttggtgattgccttaaagaatgctgtggaaatatatgcttgggctcctaaaccgtatcataaattcatggcatttaagtcttttgcagatctccagcacaagcctctgctagttgatctcacggtagaagaaggtcaaagattaaaggttatttttggttcacacactggtttccatgtaattgatgttgattcaggaaactcttatgatatctacataccatctcatattcagggcaatatcactcctcatgctattgtcatcttgcctaaaacagatggaatggaaatgcttgtttgctatgaggatgagggggtgtatgtaaacacctatggccggataactaaggatgtggtgctccaatggggagaaatgcccacgtctgtggcctacattcattccaatcagataatgggctggggcgagaaagctattgagatccggtcagtggaaacaggacatttggatggagtatttatgcataagcgagctcaaaggttaaagtttctatgtgaaagaaatgataaggtgattggacacagcaactttggcaccatccgctctaccacatgcgtgtacaaagggaaatggctctacgaggtcctcatctcctcccaggggctcatgcagatcggctggtgcaccatcagctgccgcttcaaccaggaggagggggttggagatacacacaactcctatgcctatgatggcaaccgcgtgcgcaagtggaatgtgaccacaacgaattatggcaaggcgtgggcagcgggggacatcgtgagctgcctgattgacctggatgatggcactctgtccttctgcctgaacggtgtatcactgggcactgcctttgagaacctgtccaggggcctgggtatggcctacttcccagccatcagcctctctttcaaggagtccgtggccttcaactttggcagccgtcctctgcgctacccagtggcaggctaccggcccctgcaggacccaccgagtgctgacctggtgcgggcacagaggttgctgggctgcttccgggcagtgctgagtgtggagctggaccctgtggaggggcggctgttggacaaggagagctccaagtggcggttgcggggccagcccaccgtcctcctcacactggcccacatcttccatcactttgcaccgcttctgcgcaaggtgtatctggtggaggctgtgctcatgagcttcttgctgggcatcgtggagaagggcacacccacacaggcacagtccgtggtgcaccaggtcctggacctcttgtggctcttcatggaggactacgaggtacaagattgcctcaagcagttgatgatgtctctgcttcggctgtaccgattctcacccattgtcccagacctgggcctacagatccattacctgcggctcactatcgccatcctgaggcatgagaagtcccgcaagtttctgcttagcaatgtcctcttcgacgtgctccgctccgtcgtcttcttttacatcaagagccccctgcgtgtggaggaggccggcctgcaggagctcattcccaccacctggtggccccactgctccagtagggagggcaaagagagcacggagatgaaggaggagaccgcagaggagcggctgcggcggcgagcctacgaacggggctgtcagcggctcaggaagcgcatcgaagtggtggaagaactacaggtccagatcctgaagctgctgctggacaataaagatgacaatgggggtgaagcttctaggtatatcttcctgaccaagtttcgcaagtttctgcaggagaacgccagtggccgggggaacatgcccatgctctgcccccctgagtacatggtctgcttcttacaccggctgatctctgccctgcgctactattgggatgaatacaaggcttccaatcctcatgcttccttcagtgaggaggcctacatcccgccccaggtcttctataatggcaaggtggactactttgacctgcagcgcctggggggcctcctctcgcacctgcggaagaccctcaaagatgaccttgcttccaaagccaacattgtgatcgacccactggagctccagtcaaccgccatggatgacctagatgaggatgaggagccagccccagctatggcccagcgccccatgcaggccctggctgttggggggccactgcccctgccccggcccggctggctcagttctccaactttgggccgagccaaccgcttcctcagcacagcggctgtgagcctcatgaccccacggcggcctctgagcacctcggagaaagtgaaggtccgcacgctgagcgtggagcagaggacccgtgaggacattgaaggcagccactggaatgagggcttgctgctggggcggccccccgaggagcctgagcagcccctcaccgagaactcgctgctggaagtcctggatggggcggtcatgatgtacaacctcagcgtacaccagcagctgggcaagatggtgggtgtctccgatgatgtcaatgaatacgctatggctctgagggacacagaggacaagctccgccggtgccccaagaggaggaaggacatccttgcagagttgaccaagagccagaaggttttctcagaaaagctggaccacctgagccgccgtcttgcctgggtccatgccactgtctactcccaggagaagatgctggacatctactggctgctgcgcgtctgcctgcggaccattgagcacggtgatcgcacagggtctctctttgccttcatgcccgagttctacctgagcgtggccatcaacagctacagtgctctcaagaattactttggtcccgtgcacagcatggaggagctcccaggctatgaagagaccctgacccgcctggctgccattctcgccaaacactttgccgacgcacgcattgtgggcactgacatccgagactcactgatgcaggccctggccagctacgtgtgctacccacactccctgcgggctgtggagcgaatccccgaggagcagcgtatcgccatggtgaggaacctcctggcgccctatgagcagcggccctgggcccagaccaactggatcctggtgcggctctggaggggctgtggcttcgggtaccgctatacacggctgccacatctgctgaaaaccaaacttgaggacgccaatttgcccagcctccagaagccctgcccttccaccctgctgcagcagcacatggcggacctcctacagcagggtcctgatgtggcacccagcttcctcaacagcgtcctcaatcagctcaactgggccttctctgaattcattggcatgatccaagagatccagcaggctgctgagcgcctggagcggaactttgtggacagccggcagctcaaggtatgtgccacctgctttgacctctcggtcagcctgctgcgtgtcttggagatgactatcacactggtgcctgagatattccttgactggacccggcctacctctgagatgctgctgcggcgtcttgcacagctgctaaaccaggtgctgaaccgggtgacagctgagaggaacctgtttgatcgtgtggtcaccctacggctgcctggcctagagagcgtggaccactatcccattctggtggcagtgacgggcatcctggtgcagctcctggtgcgtggcccagcctcagagagagagcaagccacatcagtgctcctggcagatccctgcttccagctacgctcaatatgctatctcctgggacagccagagcccccagcacctggcactgctctgccagcccctgaccggaagcgcttctccctgcagagctatgcggattatatcagtgccgatgagctggcccaagtggaacagatgctggcgcacctgacctctgcatctgcccaggcagcagctgcctccctgcccaccagtgaggaggacctctgccccatctgctatgcccaccccatctctgctgtgttccagccctgtggccacaagtcctgcaaagcctgtatcaaccagcacctgatgaacaacaaggactgcttcttctgcaaaaccaccatcgtgtctgtagaggactgggagaagggagccaatacgagtactacctcctcagctgcctag

SEQ ID NO: 18 - protein, 2441 aa, Homo sapiens
MASDSPARSLDEIDLSALRDPAGIFELVELVGNGTYGQVYKGRHVKTGQLAAIKVMDVTGDEEEEIKQEINMLKKYSHHRNIATYYGAFIKKNPPGMDDQLWLVMEFCGAGSVTDLIKNTKGNTLKEEWIAYICREILRGLSHLHQHKVIHRDIKGQNVLLTENAEVKLVDFGVSAQLDRTVGRRNTFIGTPYWMAPEVIACDENPDATYDFKSDLWSLGITAIEMAEGAPPLCDMHPMRALFLIPRNPAPRLKSKKWSKKFQSFIESCLVKNHSQRPATEQLMKHPFIRDQPNERQVRIQLKDHIDRTKKKRGEKDETEYEYSGSEEEEEENDSGEPSSILNLPGESTLRRDFLRLQLANKERSEALRRQQLEQQQRENEEHKRQLLAERQKRIEEQKEQRRRLEEQQRREKELRKQQEREQRRHYEEQMRREEERRRAEHEQEYKRKQLEEQRQAERLQRQLKQERDYLVSLQHQRQEQRPVEKKPLYHYKEGMSPSEKPAWAKEIPHLVAVKSQGPALTASQSVHEQPTKGLSGFQEALNVTSHRVEMPRQNSDPTSENPPLPTRIEKFDRSSWLRQEEDIPPKVPQRTTSISPALARKNSPGNGSALGPRLGSQPIRASNPDLRRTEPILESPLQRTSSGSSSSSSTPSSQPSSQGGSQPGSQAGSSERTRVRANSKSEGSPVLPHEPAKVKPEESRDITRPSRPADLTALAKELRELRIEETNRPMKKVTDYSSSSEESESSEEEEEDGESETHDGTVAVSDIPRLIPTGAPGSNEQYNVGMVGTHGLETSHADSFSGSISREGTLMIRETSGEKKRSGHSDSNGFAGHINLPDLVQQSHSPAGTPTEGLGRVSTHSQEMDSGTEYGMGSSTKASFTPFVDPRVYQTSPTDEDEEDEESSAAALFTSELLRQEQAKLNEARKISVVNVNPTNIRPHSDTPEIRKYKKRFNSEILCAALWGVNLLVGTENGLMLLDRSGQGKVYNLINRRRFQQMDVLEGLNVLVTISGKKNKLRVYYLSWLRNRILHNDPEVEKKQGWITVGDLEGCIHYKVVKYERIKFLVIALKNAVEIYAWAPKPYHKFMAFKSFADLQHKPLLVDLTVEEGQRLKVIFGSHTGFHVIDVDSGNSYDIYIPSHIQGNITPHAIVILPKTDGMEMLVCYEDEGVYVNTYGRITKDVVLQWGEMPTSVAYIHSNQIMGWGEKAIEIRSVETGHLDGVFMHKRAQRLKFLCERNDKVIGHSNFGTIRSTTCVYKGKWLYEVLISSQGLMQIGWCTISCRFNQEEGVGDTHNSYAYDGNRVRKWNVTTTNYGKAWAAGDIVSCLIDLDDGTLSFCLNGVSLGTAFENLSRGLGMAYFPAISLSFKESVAFNFGSRPLRYPVAGYRPLQDPPSADLVRAQRLLGCFRAVLSVELDPVEGRLLDKESSKWRLRGQPTVLLTLAHIFHHFAPLLRKVYLVEAVLMSFLLGIVEKGTPTQAQSVVHQVLDLLWLFMEDYEVQDCLKQLMMSLLRLYRFSPIVPDLGLQIHYLRLTIAILRHEKSRKFLLSNVLFDVLRSVVFFYIKSPLRVEEAGLQELIPTTWWPHCSSREGKESTEMKEETAEERLRRRAYERGCQRLRKRIEVVEELQVQILKLLLDNKDDNGGEASRYIFLTKFRKFLQENASGRGNMPMLCPPEYMVCFLHRLISALRYYWDEYKASNPHASFSEEAYIPPQVFYNGKVDYFDLQRLGGLLSHLRKTLKDDLASKANIVIDPLELQSTAMDDLDEDEEPAPAMAQRPMQALAVGGPLPLPRPGWLSSPTLGRANRFLSTAAVSLMTPRRPLSTSEKVKVRTLSVEQRTREDIEGSHWNEGLLLGRPPEEPEQPLTENSLLEVLDGAVMMYNLSVHQQLGKMVGVSDDVNEYAMALRDTEDKLRRCPKRRKDILAELTKSQKVFSEKLDHLSRRLAWVHATVYSQEKMLDIYWLLRVCLRTIEHGDRTGSLFAFMPEFYLSVAINSYSALKNYFGPVHSMEELPGYEETLTRLAAILAKHFADARIVGTDIRDSLMQALASYVCYPHSLRAVERIPEEQRIAMVRNLLAPYEQRPWAQTNWILVRLWRGCGFGYRYTRLPHLLKTKLEDANLPSLQKPCPSTLLQQHMADLLQQGPDVAPSFLNSVLNQLNWAFSEFIGMIQEIQQAAERLERNFVDSRQLKVCATCFDLSVSLLRVLEMTITLVPEIFLDWTRPTSEMLLRRLAQLLNQVLNRVTAERNLFDRVVTLRLPGLESVDHYPILVAVTGILVQLLVRGPASEREQATSVLLADPCFQLRSICYLLGQPEPPAPGTALPAPDRKRFSLQSYADYISADELAQVEQMLAHLTSASAQAAAASLPTSEEDLCPICYAHPISAVFQPCGHKSCKACINQHLMNNKDCFFCKTTIVSVEDWEKGANTSTTSSAA

SEQ ID NO: 19 - DNA, 2901 bp, Homo sapiens
  CDS (1)..(2901)
atggagccgcggcccacggcgccctcctccggcgccccgggactggccggggtcggggagacgccgtcagccgctgcgctggccgcagccagggtggaactgcccggcacggctgtgccctcggtgccggaggatgctgcgcccgcgagccgggacggcggcggggtccgcgatgagggccccgcggcggccggggacgggctgggcagacccttggggcccaccccgagccagagccgtttccaggtggacctggtttccgagaacgccgggcgggccgctgctgcggcggcggcggcggcggcggcagcggcggcggctggtgctggggcgggggccaagcagacccccgcggacggggaagccagcggcgagagcgagccggctaaaggcagcgaggaagccaagggccgcttccgcgtgaacttcgtggacccagctgcctcctcgtcggctgaagacagcctgtcagatgctgccggggtcggagtcgacgggcccaacgtgagcttccagaacggcggggacacggtgctgagcgagggcagcagcctgcactccggcggcggcggcggcagtgggcaccaccagcactactattatgatacccacaccaacacctactacctgcgcaccttcggccacaacaccatggacgctgtgcccaggatcgatcactaccggcacacagccgcgcagctgggcgagaagctgctccggcctagcctggcggagctccacgacgagctggaaaaggaaccttttgaggatggctttgcaaatggggaagaaagtactccaaccagagatgctgtggtcacgtatactgcagaaagtaaaggagtcgtgaagtttggctggatcaagggtgtattagtacgttgtatgttaaacatttggggtgtgatgcttttcattagattgtcatggattgtgggtcaagctggaataggtctatcagtccttgtaataatgatggccactgttgtgacaactatcacaggattgtctacttcagcaatagcaactaatggatttgtaagaggagccacccggcccaagttgaagaagatgaagagccagacgggacaggtgggtgagaagcaatcgctgaagtgtgaggcagcagccggtaatccccagccttcctaccgttggttcaaggatggcaaggagctcaaccgcagccgagacattcgcatcaaatatggcaacggcagaaagaactcacgactacagttcaacaaggtgaaggtggaggacgctggggagtatgtctgcgaggccgagaacatcctggggaaggacaccgtccggggccggctttacgtcaacagcgtgagcaccaccctgtcatcctggtcggggcacgcccggaagtgcaacgagacagccaagtcctattgcgtcaatggaggcgtctgctactacatcgagggcatcaaccagctctcctgcaaatgtccaaatggattcttcggacagagatgtttggagaaactgcctttgcgattgtacatgccagatcctaagcaaaaagccgaggagctgtaccagaagagggtcctgaccatcacgggcatctgcgtggctctgctggtcgtgggcatcgtctgtgtggtggcctactgcaagaccaaaaaacagcggaagcagatgcacaaccacctccggcagaacatgtgcccggcccatcagaaccggagcttggccaatgggcccagccacccccggctggacccagaggagatccagatggcagattatatttccaagaacgtgccagccacagaccatgtcatcaggagagaaactgagaccaccttctctgggagccactcctgttctccttctcaccactgctccacagccacacccacctccagccacagacacgagagccacacgtggagcctggaacgttctgagagcctgacttctgactcccagtcggggatcatgctatcatcagtgggtaccagcaaatgcaacagcccagcatgtgtggaggcccgggcaaggcgggcagcagcctacaacctggaggagcggcgcagggccaccgcgccaccctatcacgattccgtggactcccttcgcgactccccacacagcgagaggtacgtgtcggccctgaccacgcccgcgcgcctctcgcccgtggacttccactactcgctggccacgcaggtgccaactttcgagatcacgtcccccaactcggcgcacgccgtgtcgctgccgccggcggcgcccatcagttaccgcctggccgagcagcagccgttactgcggcacccggcgccccccggcccgggacccggacccgggcccgggcccgggcccggcgcagacatgcagcgcagctatgacagctactattaccccgcggcggggcccggaccgcggcgcgggacctgcgcgctcggcggcagcctgggcagcctgcctgccagccccttccgcatccccgaggacgacgagtacgagaccacgcaggagtgcgcgcccccgccgccgccgcggccgcgcgcgcgcggtgcgtcccgcaggacgtcggcggggccccggcgctggcgccgctcgcgcctcaacgggctggcggcgcagcgcgcacgggcggcgagggactcgctgtcgctgagcagcggctcgggcggcggctcagcctcggcgtcggacgacgacgcggacgacgcggacggggcgctggcggccgagagcacacctttcctgggcctgcgtggggcgcacgacgcgctgcgctcggactcgccgccactgtgcccggcggccgacagcaggacttactactcactggacagccacagcacgcgggccagcagcagacacagccgcgggccgcccccgcgggccaagcaggactcggcgccactctag

SEQ ID NO: 20 - protein, 966 aa, Homo sapiens
MEPRPTAPSSGAPGLAGVGETPSAAALAAARVELPGTAVPSVPEDAAPASRDGGGVRDEGPAAAGDGLGRPLGPTPSQSRFQVDLVSENAGRAAAAAAAAAAAAAAAGAGAGAKQTPADGEASGESEPAKGSEEAKGRFRVNFVDPAASSSAEDSLSDAAGVGVDGPNVSFQNGGDTVLSEGSSLHSGGGGGSGHHQHYYYDTHTNTYYLRTFGHNTMDAVPRIDHYRHTAAQLGEKLLRPSLAELHDELEKEPFEDGFANGEESTPTRDAVVTYTAESKGVVKFGWIKGVLVRCMLNIWGVMLFIRLSWIVGQAGIGLSVLVIMMATVVTTITGLSTSAIATNGFVRGATRPKLKKMKSQTGQVGEKQSLKCEAAAGNPQPSYRWFKDGKELNRSRDIRIKYGNGRKNSRLQFNKVKVEDAGEYVCEAENILGKDTVRGRLYVNSVSTTLSSWSGHARKCNETAKSYCVNGGVCYYIEGINQLSCKCPNGFFGQRCLEKLPLRLYMPDPKQKAEELYQKRVLTITGICVALLVVGIVCVVAYCKTKKQRKQMHNHLRQNMCPAHQNRSLANGPSHPRLDPEEIQMADYISKNVPATDHVIRRETETTFSGSHSCSPSHHCSTATPTSSHRHESHTWSLERSESLTSDSQSGIMLSSVGTSKCNSPACVEARARRAAAYNLEERRRATAPPYHDSVDSLRDSPHSERYVSALTTPARLSPVDFHYSLATQVPTFEITSPNSAHAVSLPPAAPISYRLAEQQPLLRHPAPPGPGPGPGPGPGPGADMQRSYDSYYYPAAGPGPRRGTCALGGSLGSLPASPFRIPEDDEYETTQECAPPPPPRPRARGASRRTSAGPRRWRRSRLNGLAAQRARAARDSLSLSSGSGGGSASASDDDADDADGALAAESTPFLGLRGAHDALRSDSPPLCPAADSRTYYSLDSHSTRASSRHSRGPPPRAKQDSAPL

SEQ ID NO: 21 - DNA, 2883 bp, Homo sapiens
  CDS (1)..(2883)
atggagccgcggcccacggcgccctcctccggcgccccgggactggccggggtcggggagacgccgtcagccgctgcgctggccgcagccagggtggaactgcccggcacggctgtgccctcggtgccggaggatgctgcgcccgcgagccgggacggcggcggggtccgcgatgagggccccgcggcggccggggacgggctgggcagacccttggggcccaccccgagccagagccgtttccaggtggacctggtttccgagaacgccgggcgggccgctgctgcggcggcggcggcggcggcggcagcggcggcggctggtgctggggcgggggccaagcagacccccgcggacggggaagccagcggcgagagcgagccggctaaaggcagcgaggaagccaagggccgcttccgcgtgaacttcgtggacccagctgcctcctcgtcggctgaagacagcctgtcagatgctgccggggtcggagtcgacgggcccaacgtgagcttccagaacggcggggacacggtgctgagcgagggcagcagcctgcactccggcggcggcggcggcagtgggcaccaccagcactactattatgatacccacaccaacacctactacctgcgcaccttcggccacaacaccatggacgctgtgcccaggatcgatcactaccggcacacagccgcgcagctgggcgagaagctgctccggcctagcctggcggagctccacgacgagctggaaaaggaaccttttgaggatggctttgcaaatggggaagaaagtactccaaccagagatgctgtggtcacgtatactgcagaaagtaaaggagtcgtgaagtttggctggatcaagggtgtattagtacgttgtatgttaaacatttggggtgtgatgcttttcattagattgtcatggattgtgggtcaagctggaataggtctatcagtccttgtaataatgatggccactgttgtgacaactatcacaggattgtctacttcagcaatagcaactaatggatttgtaagaggagccacccggcccaagttgaagaagatgaagagccagacgggacaggtgggtgagaagcaatcgctgaagtgtgaggcagcagccggtaatccccagccttcctaccgttggttcaaggatggcaaggagctcaaccgcagccgagacattcgcatcaaatatggcaacggcagaaagaactcacgactacagttcaacaaggtgaaggtggaggacgctggggagtatgtctgcgaggccgagaacatcctggggaaggacaccgtccggggccggctttacgtcaacagcgtgagcaccaccctgtcatcctggtcggggcacgcccggaagtgcaacgagacagccaagtcctattgcgtcaatggaggcgtctgctactacatcgagggcatcaaccagctctcctgcaagtgtcctgtgggatacaccggggacaggtgtcagcagttcgcaatggtcaacttctccaaagccgaggagctgtaccagaagagggtcctgaccatcacgggcatctgcgtggctctgctggtcgtgggcatcgtctgtgtggtggcctactgcaagaccaaaaaacagcggaagcagatgcacaaccacctccggcagaacatgtgcccggcccatcagaaccggagcttggccaatgggcccagccacccccggctggacccagaggagatccagatggcagattatatttccaagaacgtgccagccacagaccatgtcatcaggagagaaactgagaccaccttctctgggagccactcctgttctccttctcaccactgctccacagccacacccacctccagccacagacacgagagccacacgtggagcctggaacgttctgagagcctgacttctgactcccagtcggggatcatgctatcatcagtgggtaccagcaaatgcaacagcccagcatgtgtggaggcccgggcaaggcgggcagcagcctacaacctggaggagcggcgcagggccaccgcgccaccctatcacgattccgtggactcccttcgcgactccccacacagcgagaggtacgtgtcggccctgaccacgcccgcgcgcctctcgcccgtggacttccactactcgctggccacgcaggtgccaactttcgagatcacgtcccccaactcggcgcacgccgtgtcgctgccgccggcggcgcccatcagttaccgcctggccgagcagcagccgttactgcggcacccggcgccccccggcccgggacccggacccgggcccgggcccgggcccggcgcagacatgcagcgcagctatgacagctactattaccccgcggcggggcccggaccgcggcgcgggacctgcgcgctcggcggcagcctgggcagcctgcctgccagccccttccgcatccccgaggacgacgagtacgagaccacgcaggagtgcgcgcccccgccgccgccgcggccgcgcgcgcgcggtgcgtcccgcaggacgtcggcggggccccggcgctggcgccgctcgcgcctcaacgggctggcggcgcagcgcgcacgggcggcgagggactcgctgtcgctgagcagcggctcgggcggcggctcagcctcggcgtcggacgacgacgcggacgacgcggacggggcgctggcggccgagagcacacctttcctgggcctgcgtggggcgcacgacgcgctgcgctcggactcgccgccactgtgcccggcggccgacagcaggacttactactcactggacagccacagcacgcgggccagcagcagacacagccgcgggccgcccccgcgggccaagcaggactcggcgccactctag

SEQ ID NO: 22 - protein, 960 aa, Homo sapiens
MEPRPTAPSSGAPGLAGVGETPSAAALAAARVELPGTAVPSVPEDAAPASRDGGGVRDEGPAAAGDGLGRPLGPTPSQSRFQVDLVSENAGRAAAAAAAAAAAAAAAGAGAGAKQTPADGEASGESEPAKGSEEAKGRFRVNFVDPAASSSAEDSLSDAAGVGVDGPNVSFQNGGDTVLSEGSSLHSGGGGGSGHHQHYYYDTHTNTYYLRTFGHNTMDAVPRIDHYRHTAAQLGEKLLRPSLAELHDELEKEPFEDGFANGEESTPTRDAVVTYTAESKGVVKFGWIKGVLVRCMLNIWGVMLFIRLSWIVGQAGIGLSVLVIMMATVVTTITGLSTSAIATNGFVRGATRPKLKKMKSQTGQVGEKQSLKCEAAAGNPQPSYRWFKDGKELNRSRDIRIKYGNGRKNSRLQFNKVKVEDAGEYVCEAENILGKDTVRGRLYVNSVSTTLSSWSGHARKCNETAKSYCVNGGVCYYIEGINQLSCKCPVGYTGDRCQQFAMVNFSKAEELYQKRVLTITGICVALLVVGIVCVVAYCKTKKQRKQMHNHLRQNMCPAHQNRSLANGPSHPRLDPEEIQMADYISKNVPATDHVIRRETETTFSGSHSCSPSHHCSTATPTSSHRHESHTWSLERSESLTSDSQSGIMLSSVGTSKCNSPACVEARARRAAAYNLEERRRATAPPYHDSVDSLRDSPHSERYVSALTTPARLSPVDFHYSLATQVPTFEITSPNSAHAVSLPPAAPISYRLAEQQPLLRHPAPPGPGPGPGPGPGPGADMQRSYDSYYYPAAGPGPRRGTCALGGSLGSLPASPFRIPEDDEYETTQECAPPPPPRPRARGASRRTSAGPRRWRRSRLNGLAAQRARAARDSLSLSSGSGGGSASASDDDADDADGALAAESTPFLGLRGAHDALRSDSPPLCPAADSRTYYSLDSHSTRASSRHSRGPPPRAKQDSAPL

SEQ ID NO: 23 - DNA, 2925 bp, Homo sapiens
  CDS (1)..(2925)
atggagccgcggcccacggcgccctcctccggcgccccgggactggccggggtcggggagacgccgtcagccgctgcgctggccgcagccagggtggaactgcccggcacggctgtgccctcggtgccggaggatgctgcgcccgcgagccgggacggcggcggggtccgcgatgagggccccgcggcggccggggacgggctgggcagacccttggggcccaccccgagccagagccgtttccaggtggacctggtttccgagaacgccgggcgggccgctgctgcggcggcggcggcggcggcggcagcggcggcggctggtgctggggcgggggccaagcagacccccgcggacggggaagccagcggcgagagcgagccggctaaaggcagcgaggaagccaagggccgcttccgcgtgaacttcgtggacccagctgcctcctcgtcggctgaagacagcctgtcagatgctgccggggtcggagtcgacgggcccaacgtgagcttccagaacggcggggacacggtgctgagcgagggcagcagcctgcactccggcggcggcggcggcagtgggcaccaccagcactactattatgatacccacaccaacacctactacctgcgcaccttcggccacaacaccatggacgctgtgcccaggatcgatcactaccggcacacagccgcgcagctgggcgagaagctgctccggcctagcctggcggagctccacgacgagctggaaaaggaaccttttgaggatggctttgcaaatggggaagaaagtactccaaccagagatgctgtggtcacgtatactgcagaaagtaaaggagtcgtgaagtttggctggatcaagggtgtattagtacgttgtatgttaaacatttggggtgtgatgcttttcattagattgtcatggattgtgggtcaagctggaataggtctatcagtccttgtaataatgatggccactgttgtgacaactatcacaggattgtctacttcagcaatagcaactaatggatttgtaagaggagccacccggcccaagttgaagaagatgaagagccagacgggacaggtgggtgagaagcaatcgctgaagtgtgaggcagcagccggtaatccccagccttcctaccgttggttcaaggatggcaaggagctcaaccgcagccgagacattcgcatcaaatatggcaacggcagaaagaactcacgactacagttcaacaaggtgaaggtggaggacgctggggagtatgtctgcgaggccgagaacatcctggggaaggacaccgtccggggccggctttacgtcaacagcgtgagcaccaccctgtcatcctggtcggggcacgcccggaagtgcaacgagacagccaagtcctattgcgtcaatggaggcgtctgctactacatcgagggcatcaaccagctctcctgcaaatgtccaaatggattcttcggacagagatgtttggagaaactgcctttgcgattgtacatgccagatcctaagcaaaagcaccttggatttgaattaaaggaagccgaggagctgtaccagaagagggtcctgaccatcacgggcatctgcgtggctctgctggtcgtgggcatcgtctgtgtggtggcctactgcaagaccaaaaaacagcggaagcagatgcacaaccacctccggcagaacatgtgcccggcccatcagaaccggagcttggccaatgggcccagccacccccggctggacccagaggagatccagatggcagattatatttccaagaacgtgccagccacagaccatgtcatcaggagagaaactgagaccaccttctctgggagccactcctgttctccttctcaccactgctccacagccacacccacctccagccacagacacgagagccacacgtggagcctggaacgttctgagagcctgacttctgactcccagtcggggatcatgctatcatcagtgggtaccagcaaatgcaacagcccagcatgtgtggaggcccgggcaaggcgggcagcagcctacaacctggaggagcggcgcagggccaccgcgccaccctatcacgattccgtggactcccttcgcgactccccacacagcgagaggtacgtgtcggccctgaccacgcccgcgcgcctctcgcccgtggacttccactactcgctggccacgcaggtgccaactttcgagatcacgtcccccaactcggcgcacgccgtgtcgctgccgccggcggcgcccatcagttaccgcctggccgagcagcagccgttactgcggcacccggcgccccccggcccgggacccggacccgggcccgggcccgggcccggcgcagacatgcagcgcagctatgacagctactattaccccgcggcggggcccggaccgcggcgcgggacctgcgcgctcggcggcagcctgggcagcctgcctgccagccccttccgcatccccgaggacgacgagtacgagaccacgcaggagtgcgcgcccccgccgccgccgcggccgcgcgcgcgcggtgcgtcccgcaggacgtcggcggggccccggcgctggcgccgctcgcgcctcaacgggctggcggcgcagcgcgcacgggcggcgagggactcgctgtcgctgagcagcggctcgggcggcggctcagcctcggcgtcggacgacgacgcggacgacgcggacggggcgctggcggccgagagcacacctttcctgggcctgcgtggggcgcacgacgcgctgcgctcggactcgccgccactgtgcccggcggccgacagcaggacttactactcactggacagccacagcacgcgggccagcagcagacacagccgcgggccgcccccgcgggccaagcaggactcggcgccactctag

SEQ ID NO: 24 - protein, 974 aa, Homo sapiens
MEPRPTAPSSGAPGLAGVGETPSAAALAAARVELPGTAVPSVPEDAAPASRDGGGVRDEGPAAAGDGLGRPLGPTPSQSRFQVDLVSENAGRAAAAAAAAAAAAAAAGAGAGAKQTPADGEASGESEPAKGSEEAKGRFRVNFVDPAASSSAEDSLSDAAGVGVDGPNVSFQNGGDTVLSEGSSLHSGGGGGSGHHQHYYYDTHTNTYYLRTFGHNTMDAVPRIDHYRHTAAQLGEKLLRPSLAELHDELEKEPFEDGFANGEESTPTRDAVVTYTAESKGVVKFGWIKGVLVRCMLNIWGVMLFIRLSWIVGQAGIGLSVLVIMMATVVTTITGLSTSAIATNGFVRGATRPKLKKMKSQTGQVGEKQSLKCEAAAGNPQPSYRWFKDGKELNRSRDIRIKYGNGRKNSRLQFNKVKVEDAGEYVCEAENILGKDTVRGRLYVNSVSTTLSSWSGHARKCNETAKSYCVNGGVCYYIEGINQLSCKCPNGFFGQRCLEKLPLRLYMPDPKQKHLGFELKEAEELYQKRVLTITGICVALLVVGIVCVVAYCKTKKQRKQMHNHLRQNMCPAHQNRSLANGPSHPRLDPEEIQMADYISKNVPATDHVIRRETETTFSGSHSCSPSHHCSTATPTSSHRHESHTWSLERSESLTSDSQSGIMLSSVGTSKCNSPACVEARARRAAAYNLEERRRATAPPYHDSVDSLRDSPHSERYVSALTTPARLSPVDFHYSLATQVPTFEITSPNSAHAVSLPPAAPISYRLAEQQPLLRHPAPPGPGPGPGPGPGPGADMQRSYDSYYYPAAGPGPRRGTCALGGSLGSLPASPFRIPEDDEYETTQECAPPPPPRPRARGASRRTSAGPRRWRRSRLNGLAAQRARAARDSLSLSSGSGGGSASASDDDADDADGALAAESTPFLGLRGAHDALRSDSPPLCPAADSRTYYSLDSHSTRASSRHSRGPPPRAKQDSAPL

SEQ ID NO: 25 - DNA, 2907 bp, Homo sapiens
  CDS (1)..(2907)
atggagccgcggcccacggcgccctcctccggcgccccgggactggccggggtcggggagacgccgtcagccgctgcgctggccgcagccagggtggaactgcccggcacggctgtgccctcggtgccggaggatgctgcgcccgcgagccgggacggcggcggggtccgcgatgagggccccgcggcggccggggacgggctgggcagacccttggggcccaccccgagccagagccgtttccaggtggacctggtttccgagaacgccgggcgggccgctgctgcggcggcggcggcggcggcggcagcggcggcggctggtgctggggcgggggccaagcagacccccgcggacggggaagccagcggcgagagcgagccggctaaaggcagcgaggaagccaagggccgcttccgcgtgaacttcgtggacccagctgcctcctcgtcggctgaagacagcctgtcagatgctgccggggtcggagtcgacgggcccaacgtgagcttccagaacggcggggacacggtgctgagcgagggcagcagcctgcactccggcggcggcggcggcagtgggcaccaccagcactactattatgatacccacaccaacacctactacctgcgcaccttcggccacaacaccatggacgctgtgcccaggatcgatcactaccggcacacagccgcgcagctgggcgagaagctgctccggcctagcctggcggagctccacgacgagctggaaaaggaaccttttgaggatggctttgcaaatggggaagaaagtactccaaccagagatgctgtggtcacgtatactgcagaaagtaaaggagtcgtgaagtttggctggatcaagggtgtattagtacgttgtatgttaaacatttggggtgtgatgcttttcattagattgtcatggattgtgggtcaagctggaataggtctatcagtccttgtaataatgatggccactgttgtgacaactatcacaggattgtctacttcagcaatagcaactaatggatttgtaagaggagccacccggcccaagttgaagaagatgaagagccagacgggacaggtgggtgagaagcaatcgctgaagtgtgaggcagcagccggtaatccccagccttcctaccgttggttcaaggatggcaaggagctcaaccgcagccgagacattcgcatcaaatatggcaacggcagaaagaactcacgactacagttcaacaaggtgaaggtggaggacgctggggagtatgtctgcgaggccgagaacatcctggggaaggacaccgtccggggccggctttacgtcaacagcgtgagcaccaccctgtcatcctggtcggggcacgcccggaagtgcaacgagacagccaagtcctattgcgtcaatggaggcgtctgctactacatcgagggcatcaaccagctctcctgcaagtgtcctgtgggatacaccggggacaggtgtcagcagttcgcaatggtcaacttctccaagcaccttggatttgaattaaaggaagccgaggagctgtaccagaagagggtcctgaccatcacgggcatctgcgtggctctgctggtcgtgggcatcgtctgtgtggtggcctactgcaagaccaaaaaacagcggaagcagatgcacaaccacctccggcagaacatgtgcccggcccatcagaaccggagcttggccaatgggcccagccacccccggctggacccagaggagatccagatggcagattatatttccaagaacgtgccagccacagaccatgtcatcaggagagaaactgagaccaccttctctgggagccactcctgttctccttctcaccactgctccacagccacacccacctccagccacagacacgagagccacacgtggagcctggaacgttctgagagcctgacttctgactcccagtcggggatcatgctatcatcagtgggtaccagcaaatgcaacagcccagcatgtgtggaggcccgggcaaggcgggcagcagcctacaacctggaggagcggcgcagggccaccgcgccaccctatcacgattccgtggactcccttcgcgactccccacacagcgagaggtacgtgtcggccctgaccacgcccgcgcgcctctcgcccgtggacttccactactcgctggccacgcaggtgccaactttcgagatcacgtcccccaactcggcgcacgccgtgtcgctgccgccggcggcgcccatcagttaccgcctggccgagcagcagccgttactgcggcacccggcgccccccggcccgggacccggacccgggcccgggcccgggcccggcgcagacatgcagcgcagctatgacagctactattaccccgcggcggggcccggaccgcggcgcgggacctgcgcgctcggcggcagcctgggcagcctgcctgccagccccttccgcatccccgaggacgacgagtacgagaccacgcaggagtgcgcgcccccgccgccgccgcggccgcgcgcgcgcggtgcgtcccgcaggacgtcggcggggccccggcgctggcgccgctcgcgcctcaacgggctggcggcgcagcgcgcacgggcggcgagggactcgctgtcgctgagcagcggctcgggcggcggctcagcctcggcgtcggacgacgacgcggacgacgcggacggggcgctggcggccgagagcacacctttcctgggcctgcgtggggcgcacgacgcgctgcgctcggactcgccgccactgtgcccggcggccgacagcaggacttactactcactggacagccacagcacgcgggccagcagcagacacagccgcgggccgcccccgcgggccaagcaggactcggcgccactctag

SEQ ID NO: 26 - protein, 968 aa, Homo sapiens
MEPRPTAPSSGAPGLAGVGETPSAAALAAARVELPGTAVPSVPEDAAPASRDGGGVRDEGPAAAGDGLGRPLGPTPSQSRFQVDLVSENAGRAAAAAAAAAAAAAAAGAGAGAKQTPADGEASGESEPAKGSEEAKGRFRVNFVDPAASSSAEDSLSDAAGVGVDGPNVSFQNGGDTVLSEGSSLHSGGGGGSGHHQHYYYDTHTNTYYLRTFGHNTMDAVPRIDHYRHTAAQLGEKLLRPSLAELHDELEKEPFEDGFANGEESTPTRDAVVTYTAESKGVVKFGWIKGVLVRCMLNIWGVMLFIRLSWIVGQAGIGLSVLVIMMATVVTTITGLSTSAIATNGFVRGATRPKLKKMKSQTGQVGEKQSLKCEAAAGNPQPSYRWFKDGKELNRSRDIRIKYGNGRKNSRLQFNKVKVEDAGEYVCEAENILGKDTVRGRLYVNSVSTTLSSWSGHARKCNETAKSYCVNGGVCYYIEGINQLSCKCPVGYTGDRCQQFAMVNFSKHLGFELKEAEELYQKRVLTITGICVALLVVGIVCVVAYCKTKKQRKQMHNHLRQNMCPAHQNRSLANGPSHPRLDPEEIQMADYISKNVPATDHVIRRETETTFSGSHSCSPSHHCSTATPTSSHRHESHTWSLERSESLTSDSQSGIMLSSVGTSKCNSPACVEARARRAAAYNLEERRRATAPPYHDSVDSLRDSPHSERYVSALTTPARLSPVDFHYSLATQVPTFEITSPNSAHAVSLPPAAPISYRLAEQQPLLRHPAPPGPGPGPGPGPGPGADMQRSYDSYYYPAAGPGPRRGTCALGGSLGSLPASPFRIPEDDEYETTQECAPPPPPRPRARGASRRTSAGPRRWRRSRLNGLAAQRARAARDSLSLSSGSGGGSASASDDDADDADGALAAESTPFLGLRGAHDALRSDSPPLCPAADSRTYYSLDSHSTRASSRHSRGPPPRAKQDSAPL

SEQ ID NO: 27 - DNA, 2703 bp, Homo sapiens
  CDS (1)..(2703)
atggagccgcggcccacggcgccctcctccggcgccccgggactggccggggtcggggagacgccgtcagccgctgcgctggccgcagccagggtggaactgcccggcacggctgtgccctcggtgccggaggatgctgcgcccgcgagccgggacggcggcggggtccgcgatgagggccccgcggcggccggggacgggctgggcagacccttggggcccaccccgagccagagccgtttccaggtggacctggtttccgagaacgccgggcgggccgctgctgcggcggcggcggcggcggcggcagcggcggcggctggtgctggggcgggggccaagcagacccccgcggacggggaagccagcggcgagagcgagccggctaaaggcagcgaggaagccaagggccgcttccgcgtgaacttcgtggacccagctgcctcctcgtcggctgaagacagcctgtcagatgctgccggggtcggagtcgacgggcccaacgtgagcttccagaacggcggggacacggtgctgagcgagggcagcagcctgcactccggcggcggcggcggcagtgggcaccaccagcactactattatgatacccacaccaacacctactacctgcgcaccttcggccacaacaccatggacgctgtgcccaggatcgatcactaccggcacacagccgcgcagctgggcgagaagctgctccggcctagcctggcggagctccacgacgagctggaaaaggaaccttttgaggatggctttgcaaatggggaagaaagtactccaaccagagatgctgtggtcacgtatactgcagaaagtaaaggagtcgtgaagtttggctggatcaagggtgtattagtacgttgtatgttaaacatttggggtgtgatgcttttcattagattgtcatggattgtgggtcaagctggaataggtctatcagtccttgtaataatgatggccactgttgtgacaactatcacaggattgtctacttcagcaatagcaactaatggatttgtaagaggagccacccggcccaagttgaagaagatgaagagccagacgggacaggtgggtgagaagcaatcgctgaagtgtgaggcagcagccggtaatccccagccttcctaccgttggttcaaggatggcaaggagctcaaccgcagccgagacattcgcatcaaatatggcaacggcagaaagaactcacgactacagttcaacaaggtgaaggtggaggacgctggggagtatgtctgcgaggccgagaacatcctggggaaggacaccgtccggggccggctttacgtcaacagcgaagccgaggagctgtaccagaagagggtcctgaccatcacgggcatctgcgtggctctgctggtcgtgggcatcgtctgtgtggtggcctactgcaagaccaaaaaacagcggaagcagatgcacaaccacctccggcagaacatgtgcccggcccatcagaaccggagcttggccaatgggcccagccacccccggctggacccagaggagatccagatggcagattatatttccaagaacgtgccagccacagaccatgtcatcaggagagaaactgagaccaccttctctgggagccactcctgttctccttctcaccactgctccacagccacacccacctccagccacagacacgagagccacacgtggagcctggaacgttctgagagcctgacttctgactcccagtcggggatcatgctatcatcagtgggtaccagcaaatgcaacagcccagcatgtgtggaggcccgggcaaggcgggcagcagcctacaacctggaggagcggcgcagggccaccgcgccaccctatcacgattccgtggactcccttcgcgactccccacacagcgagaggtacgtgtcggccctgaccacgcccgcgcgcctctcgcccgtggacttccactactcgctggccacgcaggtgccaactttcgagatcacgtcccccaactcggcgcacgccgtgtcgctgccgccggcggcgcccatcagttaccgcctggccgagcagcagccgttactgcggcacccggcgccccccggcccgggacccggacccgggcccgggcccgggcccggcgcagacatgcagcgcagctatgacagctactattaccccgcggcggggcccggaccgcggcgcgggacctgcgcgctcggcggcagcctgggcagcctgcctgccagccccttccgcatccccgaggacgacgagtacgagaccacgcaggagtgcgcgcccccgccgccgccgcggccgcgcgcgcgcggtgcgtcccgcaggacgtcggcggggccccggcgctggcgccgctcgcgcctcaacgggctggcggcgcagcgcgcacgggcggcgagggactcgctgtcgctgagcagcggctcgggcggcggctcagcctcggcgtcggacgacgacgcggacgacgcggacggggcgctggcggccgagagcacacctttcctgggcctgcgtggggcgcacgacgcgctgcgctcggactcgccgccactgtgcccggcggccgacagcaggacttactactcactggacagccacagcacgcgggccagcagcagacacagccgcgggccgcccccgcgggccaagcaggactcggcgccactctag

SEQ ID NO: 28 - protein, 900 aa, Homo sapiens
MEPRPTAPSSGAPGLAGVGETPSAAALAAARVELPGTAVPSVPEDAAPASRDGGGVRDEGPAAAGDGLGRPLGPTPSQSRFQVDLVSENAGRAAAAAAAAAAAAAAAGAGAGAKQTPADGEASGESEPAKGSEEAKGRFRVNFVDPAASSSAEDSLSDAAGVGVDGPNVSFQNGGDTVLSEGSSLHSGGGGGSGHHQHYYYDTHTNTYYLRTFGHNTMDAVPRIDHYRHTAAQLGEKLLRPSLAELHDELEKEPFEDGFANGEESTPTRDAVVTYTAESKGVVKFGWIKGVLVRCMLNIWGVMLFIRLSWIVGQAGIGLSVLVIMMATVVTTITGLSTSAIATNGFVRGATRPKLKKMKSQTGQVGEKQSLKCEAAAGNPQPSYRWFKDGKELNRSRDIRIKYGNGRKNSRLQFNKVKVEDAGEYVCEAENILGKDTVRGRLYVNSEAEELYQKRVLTITGICVALLVVGIVCVVAYCKTKKQRKQMHNHLRQNMCPAHQNRSLANGPSHPRLDPEEIQMADYISKNVPATDHVIRRETETTFSGSHSCSPSHHCSTATPTSSHRHESHTWSLERSESLTSDSQSGIMLSSVGTSKCNSPACVEARARRAAAYNLEERRRATAPPYHDSVDSLRDSPHSERYVSALTTPARLSPVDFHYSLATQVPTFEITSPNSAHAVSLPPAAPISYRLAEQQPLLRHPAPPGPGPGPGPGPGPGADMQRSYDSYYYPAAGPGPRRGTCALGGSLGSLPASPFRIPEDDEYETTQECAPPPPPRPRARGASRRTSAGPRRWRRSRLNGLAAQRARAARDSLSLSSGSGGGSASASDDDADDADGALAAESTPFLGLRGAHDALRSDSPPLCPAADSRTYYSLDSHSTRASSRHSRGPPPRAKQDSAPL

SEQ ID NO: 29 - DNA, 1572 bp, Homo sapiens
  CDS (436)..(1380)
tagtgtcacgtgaggccccggtggcggcgcagctacggcaagagagtgagaaggaagggaagccggaaggggcgcgagtgaagcaaagcgaggacagacagctcgcagagggcgaggggtgcgtgtgcgtccgcttctcacctcaggtctcccttcggccccgctgccctccctcgcggctgggtgacagctgggtccggtccgtcgcgggctgcctggggtgcgaggatcgcgcaccccgtcttcgcgcgctgtgcctgccgccccgccccctcgtcccgcccgtcccgtcgcgtcgcgtcccgtcccctcgggtgctgccagccgggtgctgatgcgagtcggtggcagcgaggacattttctgactccctggcccctgacacggctgcactttccatcccgtcgcggggccggccgctactccggccccaggatgcagaatgtgattaatactgtgaagggaaaggcactggaagtggctgagtacctgaccccggtcctcaaggaatcaaagtttaaggaaacaggtgtaattaccccagaagagtttgtggcagctggagatcacctagtccaccactgtccaacatggcaatgggctacaggggaagaattgaaagtgaaggcatacctaccaacaggcaaacaatttttggtaaccaaaaatgtgccgtgctataagcggtgcaaacagatggaatattcagatgaattggaagctatcattgaagaagatgatggtgatggcggatgggtagatacatatcacaacacaggtattacaggaataacggaagccgttaaagagatcacactggaaaataaggacaatataaggcttcaagattgctcagcactatgtgaagaggaagaagatgaagatgaaggagaagctgcagatatggaagaatatgaagagagtggattgttggaaacagatgaggctaccctagatacaaggaaaatagtagaagcttgtaaagccaaaactgatgctggcggtgaagatgctattttgcaaaccagaacttatgacctttacatcacttatgataaatattaccagactccacgattatggttgtttggctatgatgagcaacggcagcctttaacagttgagcacatgtatgaagacatcagtcaggatcatgtgaagaaaacagtgaccattgaaaatcaccctcatctgccaccacctcccatgtgttcagttcacccatgcaggcatgctgaggtgatgaagaaaatcattgagactgttgcagaaggagggggagaacttggagttcatatgtatcttcttattttcttgaaatttgtacaagctgtcattccaacaatagaatatgactacacaagacacttcacaatgtaatgaagagagcataaaatctatcctaattattggttctgatttttaaagaattaacccatagatgtgaccattgaccatattcatcaatatatacagtttctctaataagggacttatatgtttatgcattaaataaaaatatgttccactaccagccttacttgtttaataaaaatcagtgcaaagagagtt

SEQ ID NO: 30 - protein, 314 aa, Homo sapiens
MQNVINTVKGKALEVAEYLTPVLKESKFKETGVITPEEFVAAGDHLVHHCPTWQWATGEELKVKAYLPTGKQFLVTKNVPCYKRCKQMEYSDELEAIIEEDDGDGGWVDTYHNTGITGITEAVKEITLENKDNIRLQDCSALCEEEEDEDEGEAADMEEYEESGLLETDEATLDTRKIVEACKAKTDAGGEDAILQTRTYDLYITYDKYYQTPRLWLFGYDEQRQPLTVEHMYEDISQDHVKKTVTIENHPHLPPPPMCSVHPCRHAEVMKKIIETVAEGGGELGVHMYLLIFLKFVQAVIPTIEYDYTRHFTM

SEQ ID NO: 31 - DNA, 4691 bp, Homo sapiens
  CDS (376)..(3330)
gtcagtctggccggctccgtcctcccgtaggctccgctgtagctagcaatgtgacaccaggacgcactcgctctcgcgcgctctcccaggctcgttctccctcgccctctctctctcacacacgcacgcacacacccacctctcccataaacacacacacacacatgcacacccacacccacgcgcgcccgcaccgccccacgcgcacacactcctgcccacgcccacgcagcgctccgggaagtccggtccgggcgagagcgcgaaaggataccgagaagccacccgcggagagcgcagcggcgccctgggacgcggcgctctcccggcgctgctgcctcggcttggtctcggcctgcgggccgtcggccggcgatggccctggattatctactactgctcctcctggcatccgcagtggctgcgatggaagaaacgttaatggacaccagaacggctactgcagagctgggctggacggccaatcctgcgtccgggtgggaagaagtcagtggctacgatgaaaacctgaacaccatccgcacctaccaggtgtgcaatgtcttcgagcccaaccagaacaattggctgctcaccaccttcatcaaccggcggggggcccatcgcatctacacagagatgcgcttcactgtgagagactgcagcagcctccctaatgtcccaggatcctgcaaggagaccttcaacttgtattactatgagactgactctgtcattgccaccaagaagtcagccttctggtctgaggccccctacctcaaagtagacaccattgctgcagatgagagcttctcccaggtggactttgggggaaggctgatgaaggtaaacacagaagtcaggagctttgggcctcttactcggaatggtttttacctcgcttttcaggattatggagcctgtatgtctcttctttctgtccgtgtcttcttcaaaaagtgtcccagcattgtgcaaaattttgcagtgtttccagagactatgacaggggcagagagcacatctctggtgattgctcggggcacatgcatccccaacgcagaggaagtggacgtgcccatcaaactctactgcaacggggatggggaatggatggtgcctattgggcgatgcacctgcaagcctggctatgagcctgagaacagcgtggcatgcaaggcttgccctgcagggacattcaaggccagccaggaagctgaaggctgctcccactgcccctccaacagccgctcccctgcagaggcgtctcccatctgcacctgtcggaccggttattaccgagcggactttgaccctccagaagtggcatgcactagcgtcccatcaggtccccgcaatgttatctccatcgtcaatgagacgtccatcattctggagtggcaccctccaagggagacaggtgggcgggatgatgtgacctacaacatcatctgcaaaaagtgccgggcagaccgccggagctgctcccgctgtgacgacaatgtggagtttgtgcccaggcagctgggcctgacggagtgccgcgtctccatcagcagcctgtgggcccacaccccctacacctttgacatccaggccatcaatggagtctccagcaagagtcccttccccccacagcacgtctctgtcaacatcaccacaaaccaagccgccccctccaccgttcccatcatgcaccaagtcagtgccactatgaggagcatcaccttgtcatggccacagccggagcagcccaatggcatcatcctggactatgagatccggtactatgagaaggaacacaatgagttcaactcctccatggccaggagtcagaccaacacagcaaggattgatgggctgcggcctggcatggtatatgtggtacaggtgcgtgcccgcactgttgctggctacggcaagttcagtggcaagatgtgcttccagactctgactgacgatgattacaagtcagagctgagggagcagctgcccctgattgctggctcggcagcggccggggtcgtgttcgttgtgtccttggtggccatctctatcgtctgtagcaggaaacgggcttatagcaaagaggctgtgtacagcgataagctccagcattacagcacaggccgaggctccccagggatgaagatctacattgaccccttcacttacgaggatcccaacgaagctgtccgggagtttgccaaggagattgatgtatcttttgtgaaaattgaagaggtcatcggagcaggggagtttggagaagtgtacaaggggcgtttgaaactgccaggcaagagggaaatctacgtggccatcaagaccctgaaggcagggtactcggagaagcagcgtcgggactttctgagtgaggcgagcatcatgggccagttcgaccatcctaacatcattcgcctggagggtgtggtcaccaagagtcggcctgtcatgatcatcacagagttcatggagaatggtgcattggattctttcctcaggcaaaatgacgggcagttcaccgtgatccagcttgtgggtatgctcaggggcatcgctgctggcatgaagtacctggctgagatgaattatgtgcatcgggacctggctgctaggaacattctggtcaacagtaacctggtgtgcaaggtgtccgactttggcctctcccgctacctccaggatgacacctcagatcccacctacaccagctccttgggagggaagatccctgtgagatggacagctccagaggccatcgcctaccgcaagttcacttcagccagcgacgtttggagctatgggatcgtcatgtgggaagtcatgtcatttggagagagaccctattgggatatgtccaaccaagatgtcatcaatgccatcgagcaggactaccggctgcccccacccatggactgtccagctgctctacaccagctcatgctggactgttggcagaaggaccggaacagccggccccggtttgcggagattgtcaacaccctagataagatgatccggaacccggcaagtctcaagactgtggcaaccatcaccgccgtgccttcccagcccctgctcgaccgctccatcccagacttcacggcctttaccaccgtggatgactggctcagcgccatcaaaatggtccagtacagggacagcttcctcactgctggcttcacctccctccagctggtcacccagatgacatcagaagacctcctgagaataggcatcaccttggcaggccatcagaagaagatcctgaacagcattcattctatgagggtccagataagtcagtcaccaacggcaatggcatgagaactcttgtttcttggggaaggagaggagggaaaaggaccagggtcaagggggaccagaggttgaccactgtggaatgtactggagagactggcttctcagctgaggaatgcatttccatcagtgaagaatcaaccggacctgttgctagcaggcaatctccatttctcagtgacagaagcatgtttgagatgccgtgggaaaccaaatatataataataaaaatataaaaaggtgatgttcaacagaagtgaagacaaaacaatatgcatcaggagaacaagagtaaacccagctcccactctcagtgggctgcagttgcccaaccacaggaagaaagggaaggaggtagagggaagaaacagaagcagtgttccattttcttcctcaccaatgacattcttttcttttctcctttcgtactcctccctgagagtcccctcccttctcccacactcgtttccctttgctcatgactcctgtagggaagtttcttcaaacaaaacccagctcctgagtctccagatgttgttctgtcagttgccaaaggactttgctgaccactgcatggggatccaaccaattcaattaatgtcttcatattgaagaagagatgtaccttcaattgaaaacctcgtttttcttttgtttgcattttctgcaaaaaggaaaaagaaaccacaaattggggaaaaaaaaagaagaaaaacctgtttccgtgtgcaaaagcacacatatgtatgtctgtgttataaaatgactgtgcttgttcgtaacagatgcaaacaagaaagaagaactgggaagtctttgtccctaggaaatccaaaggggctggaatatggtgttggtttggctttctggttggcccaatcggcctattggctcaatgggaagagaggagagggagaaaaataaaatgaaaggaaaaaaaaaagtttgcaaattcagacaggaaacaggtgagtggtttgaattggatgcagtgtgggccatcctggaatgatactgactgattaattattcctgataacatctcaagaaaaggagaaggaaagtgtttctggagaatgttctttcacatcactggaatctgcaattcaagaagtgacaagggagaattcttgctttacctatggactggcttaagccgtgtggcatccgaggaatgtttcaaatgtgtctgtgtttctctttacattccttgttgtacctcattgttcaattcacttttgtaaattccacctaacatttaattattttaaatttctccttttaccttaatctccttgctaattttatctgtctaattaaaaagagcagaagcatgtctgggtttacgtaaaaaaaaaaaaaaaaaa

SEQ ID NO: 32 - protein, 984 aa, Homo sapiens
MALDYLLLLLLASAVAAMEETLMDTRTATAELGWTANPASGWEEVSGYDENLNTIRTYQVCNVFEPNQNNWLLTTFINRRGAHRIYTEMRFTVRDCSSLPNVPGSCKETFNLYYYETDSVIATKKSAFWSEAPYLKVDTIAADESFSQVDFGGRLMKVNTEVRSFGPLTRNGFYLAFQDYGACMSLLSVRVFFKKCPSIVQNFAVFPETMTGAESTSLVIARGTCIPNAEEVDVPIKLYCNGDGEWMVPIGRCTCKPGYEPENSVACKACPAGTFKASQEAEGCSHCPSNSRSPAEASPICTCRTGYYRADFDPPEVACTSVPSGPRNVISIVNETSIILEWHPPRETGGRDDVTYNIICKKCRADRRSCSRCDDNVEFVPRQLGLTECRVSISSLWAHTPYTFDIQAINGVSSKSPFPPQHVSVNITTNQAAPSTVPIMHQVSATMRSITLSWPQPEQPNGIILDYEIRYYEKEHNEFNSSMARSQTNTARIDGLRPGMVYVVQVRARTVAGYGKFSGKMCFQTLTDDDYKSELREQLPLIAGSAAAGVVFVVSLVAISIVCSRKRAYSKEAVYSDKLQHYSTGRGSPGMKIYIDPFTYEDPNEAVREFAKEIDVSFVKIEEVIGAGEFGEVYKGRLKLPGKREIYVAIKTLKAGYSEKQRRDFLSEASIMGQFDHPNIIRLEGVVTKSRPVMIITEFMENGALDSFLRQNDGQFTVIQLVGMLRGIAAGMKYLAEMNYVHRDLAARNILVNSNLVCKVSDFGLSRYLQDDTSDPTYTSSLGGKIPVRWTAPEAIAYRKFTSASDVWSYGIVMWEVMSFGERPYWDMSNQDVINAIEQDYRLPPPMDCPAALHQLMLDCWQKDRNSRPRFAEIVNTLDKMIRNPASLKTVATITAVPSQPLLDRSIPDFTAFTTVDDWLSAIKMVQYRDSFLTAGFTSLQLVTQMTSEDLLRIGITLAGHQKKILNSIHSMRVQISQSPTAMA

SEQ ID NO: 33 - DNA, 5816 bp, Homo sapiens
  CDS (346)..(4428)
attataacagccaatgcagccgccatccacgcacaagcaaagaagcatgtcccatttaaatacacccacgcagccccagcgcccttagccgatcggggcgctcagcccacacgcaccgctgctcggggcttggagatccgcgcaggctgggctcccggacccggcggaccgacgcgcggaggatcgggatccggcgctgtggggctggggtgggcgggggaggctgggcccggggcctctggcgcgacacccgcatgaggacgcgagtgaaatagaccaaggtggaatttccaagggaaaagcttcggggtggttttggtccatttctccagcgaagaagtagacatggcgagcgactccccggctcgaagcctggatgaaatagatctctcggctctgagggaccccgcagggatctttgaattggtggaacttgttggaaatggaacatacgggcaagtttataagggtcgtcatgtcaaaacgggccagcttgcagccatcaaggttatggatgtcacaggggatgaagaggaagaaatcaaacaagaaattaacatgttgaagaaatattctcatcaccggaatattgctacatactatggtgcttttatcaaaaagaacccaccaggcatggatgaccaactttggttggtgatggagttttgtggtgctggctctgtcaccgacctgatcaagaacacaaaaggtaacacgttgaaagaggagtggattgcatacatctgcagggaaatcttacgggggctgagtcacctgcaccagcataaagtgattcatcgagatattaaagggcaaaatgtcttgctgactgaaaatgcagaagttaaactagtggactttggagtcagtgctcagcttgatcgaacagtgggcaggaggaatactttcattggaactccctactggatggcaccagaagttattgcctgtgatgaaaacccagatgccacatatgatttcaagagtgacttgtggtctttgggtatcaccgccattgaaatggcagaaggtgctccccctctctgtgacatgcaccccatgagagctctcttcctcatcccccggaacccagcgcctcggctgaagtctaagaagtggtcaaaaaaattccagtcatttattgagagctgcttggtaaagaatcacagccagcgaccagcaacagaacaattgatgaagcatccatttatacgagaccaacctaatgagcgacaggtccgcattcaactcaaggaccatattgatagaacaaagaagaagcgaggagaaaaagatgagacagagtatgagtacagtggaagtgaggaagaagaggaggagaatgactcaggagagcccagctccatcctgaatctgccaggggagtcgacgctgcggagggactttctgaggctgcagctggccaacaaggagcgttctgaggccctacggaggcagcagctggagcagcagcagcgggagaatgaggagcacaagcggcagctgctggccgagcgtcagaagcgcatcgaggagcagaaagagcagaggcggcggctggaggagcaacaaaggcgagagaaggagctgcggaagcagcaggagagggagcagcgccggcactatgaggagcagatgcgccgggaggaggagaggaggcgtgcggagcatgaacaggaatacatcaggcgacagttagaggaggagcagagacagttagagatcttgcagcagcagctactgcatgaacaagctctacttctggaatataagcgcaaacaattggaagaacagagacaagcagaaagactgcagaggcagctaaagcaagaaagagactacttagtttcccttcagcatcagcggcaggagcagaggcctgtggagaagaagccactgtaccattacaaagaaggaatgagtcctagtgagaagccagcatgggccaaggaggtagaagaacggtcaaggctcaaccggcaaagttcccctgccatgcctcacaaggttgccaacaggatatctgaccccaacctgcccccaaggtcggagtccttcagcattagtggagttcagcctgctcgaacaccccccatgctcagaccagtcgatccccagatcccacatctggtagctgtaaaatcccagggacctgccttgaccgcctcccagtcagtgcacgagcagcccacaaagggcctctctgggtttcaggaggctctgaacgtgacctcccaccgcgtggagatgccacgccagaactcagatcccacctcggaaaatcctcctctccccactcgcattgaaaagtttgaccgaagctcttggttacgacaggaagaagacattccaccaaaggtgcctcaaagaacaacttctatatccccagcattagccagaaagaattctcctgggaatggtagtgctctgggacccagactaggatctcaacccatcagagcaagcaaccctgatctccggagaactgagcccatcttggagagccccttgcagaggaccagcagtggcagttcctccagctccagcacccctagctcccagcccagctcccaaggaggctcccagcctggatcacaagcaggatccagtgaacgcaccagagttcgagccaacagtaagtcagaaggatcacctgtgctcccccatgagcctgccaaggtgaaaccagaagaatccagggacattacccggcccagtcgaccagctagctacaaaaaagctatagatgaggatctgacggcattagccaaagaactaagagaactccggattgaagaaacaaaccgcccaatgaagaaggtgactgattactcctcctccagtgaggagtcagaaagtagcgaggaagaggaggaagatggagagagcgagacccatgatgggacagtggctgtcagcgacatacccagactgataccaacaggagctccaggcagcaacgagcagtacaatgtgggaatggtggggacgcatgggctggagacctctcatgcggacagtttcagcggcagtatttcaagagaaggaaccttgatgattagagagacgtctggagagaagaagcgatctggccacagtgacagcaatggctttgctggccacatcaacctccctgacctggtgcagcagagccattctccagctggaaccccgactgagggactggggcgcgtctcaacccattcccaggagatggactctgggactgaatatggcatggggagcagcaccaaagcctccttcaccccctttgtggaccccagagtataccagacgtctcccactgatgaagatgaagaggatgaggaatcatcagccgcagctctgtttactagcgaacttcttaggcaagaacaggccaaactcaatgaagcaagaaagatttcggtggtaaatgtaaacccaaccaacattcggcctcatagcgacacaccagaaatcagaaaatacaagaaacgattcaactcagaaatactttgtgcagctctgtggggtgtaaaccttctggtggggactgaaaatggcctgatgcttttggaccgaagtgggcaaggcaaagtctataatctgatcaaccggaggcgatttcagcagatggatgtgctagagggactgaatgtccttgtgacaatttcaggaaagaagaataagctacgagtttactatctttcatggttaagaaacagaatactacataatgacccagaagtagaaaagaaacaaggctggatcactgttggggacttggaaggctgtatacattataaagttgttaaatatgaaaggatcaaatttttggtgattgccttaaagaatgctgtggaaatatatgcttgggctcctaaaccgtatcataaattcatggcatttaagtcttttgcagatctccagcacaagcctctgctagttgatctcacggtagaagaaggtcaaagattaaaggttatttttggttcacacactggtttccatgtaattgatgttgattcaggaaactcttatgatatctacataccatctcatattcagggcaatatcactcctcatgctattgtcatcttgcctaaaacagatggaatggaaatgcttgtttgctatgaggatgagggggtgtatgtaaacacctatggccggataactaaggatgtggtgctccaatggggagaaatgcccacgtctgtggcctacattcattccaatcagataatgggctggggcgagaaagctattgagatccggtcagtggaaacaggacatttggatggagtatttatgcataagcgagctcaaaggttaaagtttctatgtgaaagaaatgataaggtattttttgcatccgtgcgatctggaggaagtagccaagtgtttttcatgaccctcaacagaaattccatgatgaactggtaacagaagagcacttggcacttatcttcatggcgttatttctaatttaaaagaacataactcatgtggacttatgccagtctagaggcagaatcagaaggcttggttgaacatatcgctttccctttttcctctccctccgcccctcccagtacagtccatctttcaatgttgcagcctggttgagaaggagagaaaaaggtggcaggaatttccaggagatccccaagaatgctgccttgtctgtggacaaagatggaccatgtgcccttcggaattagggatagaaacaaatattgtgtgctcttaacgattaagctgtgttatggtgggttttcaggtttttaccttttttctttacccctttactctgcaagaatggggaaagaatgcatactgcgaaaatgagtcttttaaattctgtctgcctactagttttaagtatatggtatgttgtaaaatttccaatgatgagagacagcacaataaatgtaccttatctccttaggctgaaggccataactacatagtggagtaatttaagaactctcttgccttcaccaacccaaaaggttgctttttgatagcaactggctaatgaatttttaaaaagagaagaaaaatactagttttcccctcttttgggaaatagattttaaatggctaaactactagccttaaaactactagtctaataaaatcaactaccacttttgtgaatctgacaggccacatttttatatggccctttacagaatggagtgtgttgaacaggatactaacgccattgagttgagctggcctagcgatggagggacactctaacacaactttccctcagctattatgcaacagatcagggaaaaagatgggatgacagatggggtcagacagaaagagcttctgggaaacaagcttacatagtcttttttaaaatgcacaaagcctcccagctaagaggtcacttggtttgggcttcattaggactgagactttgttgagttctttctgggacttggagagtggatgatattcaggctctgaacattcccagcgctctcccgagggtgccactttctcaagatgaaaactgtgactgaaaaaattaataataaatgtttctgagctgcctgtgttctccctgtgtgggtgagagaagggactagactcctaagcctgcctcagatacaagaggcatcattggctccaattttagagaacttgaaagcaaggctttggacaaaattttgagaccctaatcactttaccttcctccaaattacccaacatacggtaaacaacatttgtgcagaagtatgtatgtatttagttcaggttgacttgtgtccttataaactcttactcaaatgatttgaactttaaaaaaaaaa

SEQ ID NO: 34 - protein, 1360 aa, Homo sapiens
MASDSPARSLDEIDLSALRDPAGIFELVELVGNGTYGQVYKGRHVKTGQLAAIKVMDVTGDEEEEIKQEINMLKKYSHHRNIATYYGAFIKKNPPGMDDQLWLVMEFCGAGSVTDLIKNTKGNTLKEEWIAYICREILRGLSHLHQHKVIHRDIKGQNVLLTENAEVKLVDFGVSAQLDRTVGRRNTFIGTPYWMAPEVIACDENPDATYDFKSDLWSLGITAIEMAEGAPPLCDMHPMRALFLIPRNPAPRLKSKKWSKKFQSFIESCLVKNHSQRPATEQLMKHPFIRDQPNERQVRIQLKDHIDRTKKKRGEKDETEYEYSGSEEEEEENDSGEPSSILNLPGESTLRRDFLRLQLANKERSEALRRQQLEQQQRENEEHKRQLLAERQKRIEEQKEQRRRLEEQQRREKELRKQQEREQRRHYEEQMRREEERRRAEHEQEYIRRQLEEEQRQLEILQQQLLHEQALLLEYKRKQLEEQRQAERLQRQLKQERDYLVSLQHQRQEQRPVEKKPLYHYKEGMSPSEKPAWAKEVEERSRLNRQSSPAMPHKVANRISDPNLPPRSESFSISGVQPARTPPMLRPVDPQIPHLVAVKSQGPALTASQSVHEQPTKGLSGFQEALNVTSHRVEMPRQNSDPTSENPPLPTRIEKFDRSSWLRQEEDIPPKVPQRTTSISPALARKNSPGNGSALGPRLGSQPIRASNPDLRRTEPILESPLQRTSSGSSSSSSTPSSQPSSQGGSQPGSQAGSSERTRVRANSKSEGSPVLPHEPAKVKPEESRDITRPSRPASYKKAIDEDLTALAKELRELRIEETNRPMKKVTDYSSSSEESESSEEEEEDGESETHDGTVAVSDIPRLIPTGAPGSNEQYNVGMVGTHGLETSHADSFSGSISREGTLMIRETSGEKKRSGHSDSNGFAGHINLPDLVQQSHSPAGTPTEGLGRVSTHSQEMDSGTEYGMGSSTKASFTPFVDPRVYQTSPTDEDEEDEESSAAALFTSELLRQEQAKLNEARKISVVNVNPTNIRPHSDTPEIRKYKKRFNSEILCAALWGVNLLVGTENGLMLLDRSGQGKVYNLINRRRFQQMDVLEGLNVLVTISGKKNKLRVYYLSWLRNRILHNDPEVEKKQGWITVGDLEGCIHYKVVKYERIKFLVIALKNAVEIYAWAPKPYHKFMAFKSFADLQHKPLLVDLTVEEGQRLKVIFGSHTGFHVIDVDSGNSYDIYIPSHIQGNITPHAIVILPKTDGMEMLVCYEDEGVYVNTYGRITKDVVLQWGEMPTSVAYIHSNQIMGWGEKAIEIRSVETGHLDGVFMHKRAQRLKFLCERNDKVFFASVRSGGSSQVFFMTLNRNSMMNW

SEQ ID NO: 35 - DNA, 5792 bp, Homo sapiens
  CDS (346)..(4404)
attataacagccaatgcagccgccatccacgcacaagcaaagaagcatgtcccatttaaatacacccacgcagccccagcgcccttagccgatcggggcgctcagcccacacgcaccgctgctcggggcttggagatccgcgcaggctgggctcccggacccggcggaccgacgcgcggaggatcgggatccggcgctgtggggctggggtgggcgggggaggctgggcccggggcctctggcgcgacacccgcatgaggacgcgagtgaaatagaccaaggtggaatttccaagggaaaagcttcggggtggttttggtccatttctccagcgaagaagtagacatggcgagcgactccccggctcgaagcctggatgaaatagatctctcggctctgagggaccccgcagggatctttgaattggtggaacttgttggaaatggaacatacgggcaagtttataagggtcgtcatgtcaaaacgggccagcttgcagccatcaaggttatggatgtcacaggggatgaagaggaagaaatcaaacaagaaattaacatgttgaagaaatattctcatcaccggaatattgctacatactatggtgcttttatcaaaaagaacccaccaggcatggatgaccaactttggttggtgatggagttttgtggtgctggctctgtcaccgacctgatcaagaacacaaaaggtaacacgttgaaagaggagtggattgcatacatctgcagggaaatcttacgggggctgagtcacctgcaccagcataaagtgattcatcgagatattaaagggcaaaatgtcttgctgactgaaaatgcagaagttaaactagtggactttggagtcagtgctcagcttgatcgaacagtgggcaggaggaatactttcattggaactccctactggatggcaccagaagttattgcctgtgatgaaaacccagatgccacatatgatttcaagagtgacttgtggtctttgggtatcaccgccattgaaatggcagaaggtgctccccctctctgtgacatgcaccccatgagagctctcttcctcatcccccggaacccagcgcctcggctgaagtctaagaagtggtcaaaaaaattccagtcatttattgagagctgcttggtaaagaatcacagccagcgaccagcaacagaacaattgatgaagcatccatttatacgagaccaacctaatgagcgacaggtccgcattcaactcaaggaccatattgatagaacaaagaagaagcgaggagaaaaagatgagacagagtatgagtacagtggaagtgaggaagaagaggaggagaatgactcaggagagcccagctccatcctgaatctgccaggggagtcgacgctgcggagggactttctgaggctgcagctggccaacaaggagcgttctgaggccctacggaggcagcagctggagcagcagcagcgggagaatgaggagcacaagcggcagctgctggccgagcgtcagaagcgcatcgaggagcagaaagagcagaggcggcggctggaggagcaacaaaggcgagagaaggagctgcggaagcagcaggagagggagcagcgccggcactatgaggagcagatgcgccgggaggaggagaggaggcgtgcggagcatgaacaggaatacatcaggcgacagttagaggaggagcagagacagttagagatcttgcagcagcagctactgcatgaacaagctctacttctggaatataagcgcaaacaattggaagaacagagacaagcagaaagactgcagaggcagctaaagcaagaaagagactacttagtttcccttcagcatcagcggcaggagcagaggcctgtggagaagaagccactgtaccattacaaagaaggaatgagtcctagtgagaagccagcatgggccaaggaggtagaagaacggtcaaggctcaaccggcaaagttcccctgccatgcctcacaaggttgccaacaggatatctgaccccaacctgcccccaaggtcggagtccttcagcattagtggagttcagcctgctcgaacaccccccatgctcagaccagtcgatccccagatcccacatctggtagctgtaaaatcccagggacctgccttgaccgcctcccagtcagtgcacgagcagcccacaaagggcctctctgggtttcaggaggctctgaacgtgacctcccaccgcgtggagatgccacgccagaactcagatcccacctcggaaaatcctcctctccccactcgcattgaaaagtttgaccgaagctcttggttacgacaggaagaagacattccaccaaaggtgcctcaaagaacaacttctatatccccagcattagccagaaagaattctcctgggaatggtagtgctctgggacccagactaggatctcaacccatcagagcaagcaaccctgatctccggagaactgagcccatcttggagagccccttgcagaggaccagcagtggcagttcctccagctccagcacccctagctcccagcccagctcccaaggaggctcccagcctggatcacaagcaggatccagtgaacgcaccagagttcgagccaacagtaagtcagaaggatcacctgtgctcccccatgagcctgccaaggtgaaaccagaagaatccagggacattacccggcccagtcgaccagctgatctgacggcattagccaaagaactaagagaactccggattgaagaaacaaaccgcccaatgaagaaggtgactgattactcctcctccagtgaggagtcagaaagtagcgaggaagaggaggaagatggagagagcgagacccatgatgggacagtggctgtcagcgacatacccagactgataccaacaggagctccaggcagcaacgagcagtacaatgtgggaatggtggggacgcatgggctggagacctctcatgcggacagtttcagcggcagtatttcaagagaaggaaccttgatgattagagagacgtctggagagaagaagcgatctggccacagtgacagcaatggctttgctggccacatcaacctccctgacctggtgcagcagagccattctccagctggaaccccgactgagggactggggcgcgtctcaacccattcccaggagatggactctgggactgaatatggcatggggagcagcaccaaagcctccttcaccccctttgtggaccccagagtataccagacgtctcccactgatgaagatgaagaggatgaggaatcatcagccgcagctctgtttactagcgaacttcttaggcaagaacaggccaaactcaatgaagcaagaaagatttcggtggtaaatgtaaacccaaccaacattcggcctcatagcgacacaccagaaatcagaaaatacaagaaacgattcaactcagaaatactttgtgcagctctgtggggtgtaaaccttctggtggggactgaaaatggcctgatgcttttggaccgaagtgggcaaggcaaagtctataatctgatcaaccggaggcgatttcagcagatggatgtgctagagggactgaatgtccttgtgacaatttcaggaaagaagaataagctacgagtttactatctttcatggttaagaaacagaatactacataatgacccagaagtagaaaagaaacaaggctggatcactgttggggacttggaaggctgtatacattataaagttgttaaatatgaaaggatcaaatttttggtgattgccttaaagaatgctgtggaaatatatgcttgggctcctaaaccgtatcataaattcatggcatttaagtcttttgcagatctccagcacaagcctctgctagttgatctcacggtagaagaaggtcaaagattaaaggttatttttggttcacacactggtttccatgtaattgatgttgattcaggaaactcttatgatatctacataccatctcatattcagggcaatatcactcctcatgctattgtcatcttgcctaaaacagatggaatggaaatgcttgtttgctatgaggatgagggggtgtatgtaaacacctatggccggataactaaggatgtggtgctccaatggggagaaatgcccacgtctgtggcctacattcattccaatcagataatgggctggggcgagaaagctattgagatccggtcagtggaaacaggacatttggatggagtatttatgcataagcgagctcaaaggttaaagtttctatgtgaaagaaatgataaggtattttttgcatccgtgcgatctggaggaagtagccaagtgtttttcatgaccctcaacagaaattccatgatgaactggtaacagaagagcacttggcacttatcttcatggcgttatttctaatttaaaagaacataactcatgtggacttatgccagtctagaggcagaatcagaaggcttggttgaacatatcgctttccctttttcctctccctccgcccctcccagtacagtccatctttcaatgttgcagcctggttgagaaggagagaaaaaggtggcaggaatttccaggagatccccaagaatgctgccttgtctgtggacaaagatggaccatgtgcccttcggaattagggatagaaacaaatattgtgtgctcttaacgattaagctgtgttatggtgggttttcaggtttttaccttttttctttacccctttactctgcaagaatggggaaagaatgcatactgcgaaaatgagtcttttaaattctgtctgcctactagttttaagtatatggtatgttgtaaaatttccaatgatgagagacagcacaataaatgtaccttatctccttaggctgaaggccataactacatagtggagtaatttaagaactctcttgccttcaccaacccaaaaggttgctttttgatagcaactggctaatgaatttttaaaaagagaagaaaaatactagttttcccctcttttgggaaatagattttaaatggctaaactactagccttaaaactactagtctaataaaatcaactaccacttttgtgaatctgacaggccacatttttatatggccctttacagaatggagtgtgttgaacaggatactaacgccattgagttgagctggcctagcgatggagggacactctaacacaactttccctcagctattatgcaacagatcagggaaaaagatgggatgacagatggggtcagacagaaagagcttctgggaaacaagcttacatagtcttttttaaaatgcacaaagcctcccagctaagaggtcacttggtttgggcttcattaggactgagactttgttgagttctttctgggacttggagagtggatgatattcaggctctgaacattcccagcgctctcccgagggtgccactttctcaagatgaaaactgtgactgaaaaaattaataataaatgtttctgagctgcctgtgttctccctgtgtgggtgagagaagggactagactcctaagcctgcctcagatacaagaggcatcattggctccaattttagagaacttgaaagcaaggctttggacaaaattttgagaccctaatcactttaccttcctccaaattacccaacatacggtaaacaacatttgtgcagaagtatgtatgtatttagttcaggttgacttgtgtccttataaactcttactcaaatgatttgaactttaaaaaaaaaa

SEQ ID NO: 36 - protein, 1352 aa, Homo sapiens
MASDSPARSLDEIDLSALRDPAGIFELVELVGNGTYGQVYKGRHVKTGQLAAIKVMDVTGDEEEEIKQEINMLKKYSHHRNIATYYGAFIKKNPPGMDDQLWLVMEFCGAGSVTDLIKNTKGNTLKEEWIAYICREILRGLSHLHQHKVIHRDIKGQNVLLTENAEVKLVDFGVSAQLDRTVGRRNTFIGTPYWMAPEVIACDENPDATYDFKSDLWSLGITAIEMAEGAPPLCDMHPMRALFLIPRNPAPRLKSKKWSKKFQSFIESCLVKNHSQRPATEQLMKHPFIRDQPNERQVRIQLKDHIDRTKKKRGEKDETEYEYSGSEEEEEENDSGEPSSILNLPGESTLRRDFLRLQLANKERSEALRRQQLEQQQRENEEHKRQLLAERQKRIEEQKEQRRRLEEQQRREKELRKQQEREQRRHYEEQMRREEERRRAEHEQEYIRRQLEEEQRQLEILQQQLLHEQALLLEYKRKQLEEQRQAERLQRQLKQERDYLVSLQHQRQEQRPVEKKPLYHYKEGMSPSEKPAWAKEVEERSRLNRQSSPAMPHKVANRISDPNLPPRSESFSISGVQPARTPPMLRPVDPQIPHLVAVKSQGPALTASQSVHEQPTKGLSGFQEALNVTSHRVEMPRQNSDPTSENPPLPTRIEKFDRSSWLRQEEDIPPKVPQRTTSISPALARKNSPGNGSALGPRLGSQPIRASNPDLRRTEPILESPLQRTSSGSSSSSSTPSSQPSSQGGSQPGSQAGSSERTRVRANSKSEGSPVLPHEPAKVKPEESRDITRPSRPADLTALAKELRELRIEETNRPMKKVTDYSSSSEESESSEEEEEDGESETHDGTVAVSDIPRLIPTGAPGSNEQYNVGMVGTHGLETSHADSFSGSISREGTLMIRETSGEKKRSGHSDSNGFAGHINLPDLVQQSHSPAGTPTEGLGRVSTHSQEMDSGTEYGMGSSTKASFTPFVDPRVYQTSPTDEDEEDEESSAAALFTSELLRQEQAKLNEARKISVVNVNPTNIRPHSDTPEIRKYKKRFNSEILCAALWGVNLLVGTENGLMLLDRSGQGKVYNLINRRRFQQMDVLEGLNVLVTISGKKNKLRVYYLSWLRNRILHNDPEVEKKQGWITVGDLEGCIHYKVVKYERIKFLVIALKNAVEIYAWAPKPYHKFMAFKSFADLQHKPLLVDLTVEEGQRLKVIFGSHTGFHVIDVDSGNSYDIYIPSHIQGNITPHAIVILPKTDGMEMLVCYEDEGVYVNTYGRITKDVVLQWGEMPTSVAYIHSNQIMGWGEKAIEIRSVETGHLDGVFMHKRAQRLKFLCERNDKVFFASVRSGGSSQVFFMTLNRNSMMNW

SEQ ID NO: 37 - DNA, 5729 bp, Homo sapiens
  CDS (346)..(4341)
attataacagccaatgcagccgccatccacgcacaagcaaagaagcatgtcccatttaaatacacccacgcagccccagcgcccttagccgatcggggcgctcagcccacacgcaccgctgctcggggcttggagatccgcgcaggctgggctcccggacccggcggaccgacgcgcggaggatcgggatccggcgctgtggggctggggtgggcgggggaggctgggcccggggcctctggcgcgacacccgcatgaggacgcgagtgaaatagaccaaggtggaatttccaagggaaaagcttcggggtggttttggtccatttctccagcgaagaagtagacatggcgagcgactccccggctcgaagcctggatgaaatagatctctcggctctgagggaccccgcagggatctttgaattggtggaacttgttggaaatggaacatacgggcaagtttataagggtcgtcatgtcaaaacgggccagcttgcagccatcaaggttatggatgtcacaggggatgaagaggaagaaatcaaacaagaaattaacatgttgaagaaatattctcatcaccggaatattgctacatactatggtgcttttatcaaaaagaacccaccaggcatggatgaccaactttggttggtgatggagttttgtggtgctggctctgtcaccgacctgatcaagaacacaaaaggtaacacgttgaaagaggagtggattgcatacatctgcagggaaatcttacgggggctgagtcacctgcaccagcataaagtgattcatcgagatattaaagggcaaaatgtcttgctgactgaaaatgcagaagttaaactagtggactttggagtcagtgctcagcttgatcgaacagtgggcaggaggaatactttcattggaactccctactggatggcaccagaagttattgcctgtgatgaaaacccagatgccacatatgatttcaagagtgacttgtggtctttgggtatcaccgccattgaaatggcagaaggtgctccccctctctgtgacatgcaccccatgagagctctcttcctcatcccccggaacccagcgcctcggctgaagtctaagaagtggtcaaaaaaattccagtcatttattgagagctgcttggtaaagaatcacagccagcgaccagcaacagaacaattgatgaagcatccatttatacgagaccaacctaatgagcgacaggtccgcattcaactcaaggaccatattgatagaacaaagaagaagcgaggagaaaaagatgagacagagtatgagtacagtggaagtgaggaagaagaggaggagaatgactcaggagagcccagctccatcctgaatctgccaggggagtcgacgctgcggagggactttctgaggctgcagctggccaacaaggagcgttctgaggccctacggaggcagcagctggagcagcagcagcgggagaatgaggagcacaagcggcagctgctggccgagcgtcagaagcgcatcgaggagcagaaagagcagaggcggcggctggaggagcaacaaaggcgagagaaggagctgcggaagcagcaggagagggagcagcgccggcactatgaggagcagatgcgccgggaggaggagaggaggcgtgcggagcatgaacaggaatataagcgcaaacaattggaagaacagagacaagcagaaagactgcagaggcagctaaagcaagaaagagactacttagtttcccttcagcatcagcggcaggagcagaggcctgtggagaagaagccactgtaccattacaaagaaggaatgagtcctagtgagaagccagcatgggccaaggaggtagaagaacggtcaaggctcaaccggcaaagttcccctgccatgcctcacaaggttgccaacaggatatctgaccccaacctgcccccaaggtcggagtccttcagcattagtggagttcagcctgctcgaacaccccccatgctcagaccagtcgatccccagatcccacatctggtagctgtaaaatcccagggacctgccttgaccgcctcccagtcagtgcacgagcagcccacaaagggcctctctgggtttcaggaggctctgaacgtgacctcccaccgcgtggagatgccacgccagaactcagatcccacctcggaaaatcctcctctccccactcgcattgaaaagtttgaccgaagctcttggttacgacaggaagaagacattccaccaaaggtgcctcaaagaacaacttctatatccccagcattagccagaaagaattctcctgggaatggtagtgctctgggacccagactaggatctcaacccatcagagcaagcaaccctgatctccggagaactgagcccatcttggagagccccttgcagaggaccagcagtggcagttcctccagctccagcacccctagctcccagcccagctcccaaggaggctcccagcctggatcacaagcaggatccagtgaacgcaccagagttcgagccaacagtaagtcagaaggatcacctgtgctcccccatgagcctgccaaggtgaaaccagaagaatccagggacattacccggcccagtcgaccagctagctacaaaaaagctatagatgaggatctgacggcattagccaaagaactaagagaactccggattgaagaaacaaaccgcccaatgaagaaggtgactgattactcctcctccagtgaggagtcagaaagtagcgaggaagaggaggaagatggagagagcgagacccatgatgggacagtggctgtcagcgacatacccagactgataccaacaggagctccaggcagcaacgagcagtacaatgtgggaatggtggggacgcatgggctggagacctctcatgcggacagtttcagcggcagtatttcaagagaaggaaccttgatgattagagagacgtctggagagaagaagcgatctggccacagtgacagcaatggctttgctggccacatcaacctccctgacctggtgcagcagagccattctccagctggaaccccgactgagggactggggcgcgtctcaacccattcccaggagatggactctgggactgaatatggcatggggagcagcaccaaagcctccttcaccccctttgtggaccccagagtataccagacgtctcccactgatgaagatgaagaggatgaggaatcatcagccgcagctctgtttactagcgaacttcttaggcaagaacaggccaaactcaatgaagcaagaaagatttcggtggtaaatgtaaacccaaccaacattcggcctcatagcgacacaccagaaatcagaaaatacaagaaacgattcaactcagaaatactttgtgcagctctgtggggtgtaaaccttctggtggggactgaaaatggcctgatgcttttggaccgaagtgggcaaggcaaagtctataatctgatcaaccggaggcgatttcagcagatggatgtgctagagggactgaatgtccttgtgacaatttcaggaaagaagaataagctacgagtttactatctttcatggttaagaaacagaatactacataatgacccagaagtagaaaagaaacaaggctggatcactgttggggacttggaaggctgtatacattataaagttgttaaatatgaaaggatcaaatttttggtgattgccttaaagaatgctgtggaaatatatgcttgggctcctaaaccgtatcataaattcatggcatttaagtcttttgcagatctccagcacaagcctctgctagttgatctcacggtagaagaaggtcaaagattaaaggttatttttggttcacacactggtttccatgtaattgatgttgattcaggaaactcttatgatatctacataccatctcatattcagggcaatatcactcctcatgctattgtcatcttgcctaaaacagatggaatggaaatgcttgtttgctatgaggatgagggggtgtatgtaaacacctatggccggataactaaggatgtggtgctccaatggggagaaatgcccacgtctgtggcctacattcattccaatcagataatgggctggggcgagaaagctattgagatccggtcagtggaaacaggacatttggatggagtatttatgcataagcgagctcaaaggttaaagtttctatgtgaaagaaatgataaggtattttttgcatccgtgcgatctggaggaagtagccaagtgtttttcatgaccctcaacagaaattccatgatgaactggtaacagaagagcacttggcacttatcttcatggcgttatttctaatttaaaagaacataactcatgtggacttatgccagtctagaggcagaatcagaaggcttggttgaacatatcgctttccctttttcctctccctccgcccctcccagtacagtccatctttcaatgttgcagcctggttgagaaggagagaaaaaggtggcaggaatttccaggagatccccaagaatgctgccttgtctgtggacaaagatggaccatgtgcccttcggaattagggatagaaacaaatattgtgtgctcttaacgattaagctgtgttatggtgggttttcaggtttttaccttttttctttacccctttactctgcaagaatggggaaagaatgcatactgcgaaaatgagtcttttaaattctgtctgcctactagttttaagtatatggtatgttgtaaaatttccaatgatgagagacagcacaataaatgtaccttatctccttaggctgaaggccataactacatagtggagtaatttaagaactctcttgccttcaccaacccaaaaggttgctttttgatagcaactggctaatgaatttttaaaaagagaagaaaaatactagttttcccctcttttgggaaatagattttaaatggctaaactactagccttaaaactactagtctaataaaatcaactaccacttttgtgaatctgacaggccacatttttatatggccctttacagaatggagtgtgttgaacaggatactaacgccattgagttgagctggcctagcgatggagggacactctaacacaactttccctcagctattatgcaacagatcagggaaaaagatgggatgacagatggggtcagacagaaagagcttctgggaaacaagcttacatagtcttttttaaaatgcacaaagcctcccagctaagaggtcacttggtttgggcttcattaggactgagactttgttgagttctttctgggacttggagagtggatgatattcaggctctgaacattcccagcgctctcccgagggtgccactttctcaagatgaaaactgtgactgaaaaaattaataataaatgtttctgagctgcctgtgttctccctgtgtgggtgagagaagggactagactcctaagcctgcctcagatacaagaggcatcattggctccaattttagagaacttgaaagcaaggctttggacaaaattttgagaccctaatcactttaccttcctccaaattacccaacatacggtaaacaacatttgtgcagaagtatgtatgtatttagttcaggttgacttgtgtccttataaactcttactcaaatgatttgaactttaaaaaaaaaa

SEQ ID NO: 38 - protein, 1331 aa, Homo sapiens
MASDSPARSLDEIDLSALRDPAGIFELVELVGNGTYGQVYKGRHVKTGQLAAIKVMDVTGDEEEEIKQEINMLKKYSHHRNIATYYGAFIKKNPPGMDDQLWLVMEFCGAGSVTDLIKNTKGNTLKEEWIAYICREILRGLSHLHQHKVIHRDIKGQNVLLTENAEVKLVDFGVSAQLDRTVGRRNTFIGTPYWMAPEVIACDENPDATYDFKSDLWSLGITAIEMAEGAPPLCDMHPMRALFLIPRNPAPRLKSKKWSKKFQSFIESCLVKNHSQRPATEQLMKHPFIRDQPNERQVRIQLKDHIDRTKKKRGEKDETEYEYSGSEEEEEENDSGEPSSILNLPGESTLRRDFLRLQLANKERSEALRRQQLEQQQRENEEHKRQLLAERQKRIEEQKEQRRRLEEQQRREKELRKQQEREQRRHYEEQMRREEERRRAEHEQEYKRKQLEEQRQAERLQRQLKQERDYLVSLQHQRQEQRPVEKKPLYHYKEGMSPSEKPAWAKEVEERSRLNRQSSPAMPHKVANRISDPNLPPRSESFSISGVQPARTPPMLRPVDPQIPHLVAVKSQGPALTASQSVHEQPTKGLSGFQEALNVTSHRVEMPRQNSDPTSENPPLPTRIEKFDRSSWLRQEEDIPPKVPQRTTSISPALARKNSPGNGSALGPRLGSQPIRASNPDLRRTEPILESPLQRTSSGSSSSSSTPSSQPSSQGGSQPGSQAGSSERTRVRANSKSEGSPVLPHEPAKVKPEESRDITRPSRPASYKKAIDEDLTALAKELRELRIEETNRPMKKVTDYSSSSEESESSEEEEEDGESETHDGTVAVSDIPRLIPTGAPGSNEQYNVGMVGTHGLETSHADSFSGSISREGTLMIRETSGEKKRSGHSDSNGFAGHINLPDLVQQSHSPAGTPTEGLGRVSTHSQEMDSGTEYGMGSSTKASFTPFVDPRVYQTSPTDEDEEDEESSAAALFTSELLRQEQAKLNEARKISVVNVNPTNIRPHSDTPEIRKYKKRFNSEILCAALWGVNLLVGTENGLMLLDRSGQGKVYNLINRRRFQQMDVLEGLNVLVTISGKKNKLRVYYLSWLRNRILHNDPEVEKKQGWITVGDLEGCIHYKVVKYERIKFLVIALKNAVEIYAWAPKPYHKFMAFKSFADLQHKPLLVDLTVEEGQRLKVIFGSHTGFHVIDVDSGNSYDIYIPSHIQGNITPHAIVILPKTDGMEMLVCYEDEGVYVNTYGRITKDVVLQWGEMPTSVAYIHSNQIMGWGEKAIEIRSVETGHLDGVFMHKRAQRLKFLCERNDKVFFASVRSGGSSQVFFMTLNRNSMMNW

SEQ ID NO: 39 - DNA, 5705 bp, Homo sapiens
  CDS (346)..(4317)
attataacagccaatgcagccgccatccacgcacaagcaaagaagcatgtcccatttaaatacacccacgcagccccagcgcccttagccgatcggggcgctcagcccacacgcaccgctgctcggggcttggagatccgcgcaggctgggctcccggacccggcggaccgacgcgcggaggatcgggatccggcgctgtggggctggggtgggcgggggaggctgggcccggggcctctggcgcgacacccgcatgaggacgcgagtgaaatagaccaaggtggaatttccaagggaaaagcttcggggtggttttggtccatttctccagcgaagaagtagacatggcgagcgactccccggctcgaagcctggatgaaatagatctctcggctctgagggaccccgcagggatctttgaattggtggaacttgttggaaatggaacatacgggcaagtttataagggtcgtcatgtcaaaacgggccagcttgcagccatcaaggttatggatgtcacaggggatgaagaggaagaaatcaaacaagaaattaacatgttgaagaaatattctcatcaccggaatattgctacatactatggtgcttttatcaaaaagaacccaccaggcatggatgaccaactttggttggtgatggagttttgtggtgctggctctgtcaccgacctgatcaagaacacaaaaggtaacacgttgaaagaggagtggattgcatacatctgcagggaaatcttacgggggctgagtcacctgcaccagcataaagtgattcatcgagatattaaagggcaaaatgtcttgctgactgaaaatgcagaagttaaactagtggactttggagtcagtgctcagcttgatcgaacagtgggcaggaggaatactttcattggaactccctactggatggcaccagaagttattgcctgtgatgaaaacccagatgccacatatgatttcaagagtgacttgtggtctttgggtatcaccgccattgaaatggcagaaggtgctccccctctctgtgacatgcaccccatgagagctctcttcctcatcccccggaacccagcgcctcggctgaagtctaagaagtggtcaaaaaaattccagtcatttattgagagctgcttggtaaagaatcacagccagcgaccagcaacagaacaattgatgaagcatccatttatacgagaccaacctaatgagcgacaggtccgcattcaactcaaggaccatattgatagaacaaagaagaagcgaggagaaaaagatgagacagagtatgagtacagtggaagtgaggaagaagaggaggagaatgactcaggagagcccagctccatcctgaatctgccaggggagtcgacgctgcggagggactttctgaggctgcagctggccaacaaggagcgttctgaggccctacggaggcagcagctggagcagcagcagcgggagaatgaggagcacaagcggcagctgctggccgagcgtcagaagcgcatcgaggagcagaaagagcagaggcggcggctggaggagcaacaaaggcgagagaaggagctgcggaagcagcaggagagggagcagcgccggcactatgaggagcagatgcgccgggaggaggagaggaggcgtgcggagcatgaacaggaatataagcgcaaacaattggaagaacagagacaagcagaaagactgcagaggcagctaaagcaagaaagagactacttagtttcccttcagcatcagcggcaggagcagaggcctgtggagaagaagccactgtaccattacaaagaaggaatgagtcctagtgagaagccagcatgggccaaggaggtagaagaacggtcaaggctcaaccggcaaagttcccctgccatgcctcacaaggttgccaacaggatatctgaccccaacctgcccccaaggtcggagtccttcagcattagtggagttcagcctgctcgaacaccccccatgctcagaccagtcgatccccagatcccacatctggtagctgtaaaatcccagggacctgccttgaccgcctcccagtcagtgcacgagcagcccacaaagggcctctctgggtttcaggaggctctgaacgtgacctcccaccgcgtggagatgccacgccagaactcagatcccacctcggaaaatcctcctctccccactcgcattgaaaagtttgaccgaagctcttggttacgacaggaagaagacattccaccaaaggtgcctcaaagaacaacttctatatccccagcattagccagaaagaattctcctgggaatggtagtgctctgggacccagactaggatctcaacccatcagagcaagcaaccctgatctccggagaactgagcccatcttggagagccccttgcagaggaccagcagtggcagttcctccagctccagcacccctagctcccagcccagctcccaaggaggctcccagcctggatcacaagcaggatccagtgaacgcaccagagttcgagccaacagtaagtcagaaggatcacctgtgctcccccatgagcctgccaaggtgaaaccagaagaatccagggacattacccggcccagtcgaccagctgatctgacggcattagccaaagaactaagagaactccggattgaagaaacaaaccgcccaatgaagaaggtgactgattactcctcctccagtgaggagtcagaaagtagcgaggaagaggaggaagatggagagagcgagacccatgatgggacagtggctgtcagcgacatacccagactgataccaacaggagctccaggcagcaacgagcagtacaatgtgggaatggtggggacgcatgggctggagacctctcatgcggacagtttcagcggcagtatttcaagagaaggaaccttgatgattagagagacgtctggagagaagaagcgatctggccacagtgacagcaatggctttgctggccacatcaacctccctgacctggtgcagcagagccattctccagctggaaccccgactgagggactggggcgcgtctcaacccattcccaggagatggactctgggactgaatatggcatggggagcagcaccaaagcctccttcaccccctttgtggaccccagagtataccagacgtctcccactgatgaagatgaagaggatgaggaatcatcagccgcagctctgtttactagcgaacttcttaggcaagaacaggccaaactcaatgaagcaagaaagatttcggtggtaaatgtaaacccaaccaacattcggcctcatagcgacacaccagaaatcagaaaatacaagaaacgattcaactcagaaatactttgtgcagctctgtggggtgtaaaccttctggtggggactgaaaatggcctgatgcttttggaccgaagtgggcaaggcaaagtctataatctgatcaaccggaggcgatttcagcagatggatgtgctagagggactgaatgtccttgtgacaatttcaggaaagaagaataagctacgagtttactatctttcatggttaagaaacagaatactacataatgacccagaagtagaaaagaaacaaggctggatcactgttggggacttggaaggctgtatacattataaagttgttaaatatgaaaggatcaaatttttggtgattgccttaaagaatgctgtggaaatatatgcttgggctcctaaaccgtatcataaattcatggcatttaagtcttttgcagatctccagcacaagcctctgctagttgatctcacggtagaagaaggtcaaagattaaaggttatttttggttcacacactggtttccatgtaattgatgttgattcaggaaactcttatgatatctacataccatctcatattcagggcaatatcactcctcatgctattgtcatcttgcctaaaacagatggaatggaaatgcttgtttgctatgaggatgagggggtgtatgtaaacacctatggccggataactaaggatgtggtgctccaatggggagaaatgcccacgtctgtggcctacattcattccaatcagataatgggctggggcgagaaagctattgagatccggtcagtggaaacaggacatttggatggagtatttatgcataagcgagctcaaaggttaaagtttctatgtgaaagaaatgataaggtattttttgcatccgtgcgatctggaggaagtagccaagtgtttttcatgaccctcaacagaaattccatgatgaactggtaacagaagagcacttggcacttatcttcatggcgttatttctaatttaaaagaacataactcatgtggacttatgccagtctagaggcagaatcagaaggcttggttgaacatatcgctttccctttttcctctccctccgcccctcccagtacagtccatctttcaatgttgcagcctggttgagaaggagagaaaaaggtggcaggaatttccaggagatccccaagaatgctgccttgtctgtggacaaagatggaccatgtgcccttcggaattagggatagaaacaaatattgtgtgctcttaacgattaagctgtgttatggtgggttttcaggtttttaccttttttctttacccctttactctgcaagaatggggaaagaatgcatactgcgaaaatgagtcttttaaattctgtctgcctactagttttaagtatatggtatgttgtaaaatttccaatgatgagagacagcacaataaatgtaccttatctccttaggctgaaggccataactacatagtggagtaatttaagaactctcttgccttcaccaacccaaaaggttgctttttgatagcaactggctaatgaatttttaaaaagagaagaaaaatactagttttcccctcttttgggaaatagattttaaatggctaaactactagccttaaaactactagtctaataaaatcaactaccacttttgtgaatctgacaggccacatttttatatggccctttacagaatggagtgtgttgaacaggatactaacgccattgagttgagctggcctagcgatggagggacactctaacacaactttccctcagctattatgcaacagatcagggaaaaagatgggatgacagatggggtcagacagaaagagcttctgggaaacaagcttacatagtcttttttaaaatgcacaaagcctcccagctaagaggtcacttggtttgggcttcattaggactgagactttgttgagttctttctgggacttggagagtggatgatattcaggctctgaacattcccagcgctctcccgagggtgccactttctcaagatgaaaactgtgactgaaaaaattaataataaatgtttctgagctgcctgtgttctccctgtgtgggtgagagaagggactagactcctaagcctgcctcagatacaagaggcatcattggctccaattttagagaacttgaaagcaaggctttggacaaaattttgagaccctaatcactttaccttcctccaaattacccaacatacggtaaacaacatttgtgcagaagtatgtatgtatttagttcaggttgacttgtgtccttataaactcttactcaaatgatttgaactttaaaaaaaaaa

SEQ ID NO: 40 - protein, 1323 aa, Homo sapiens
MASDSPARSLDEIDLSALRDPAGIFELVELVGNGTYGQVYKGRHVKTGQLAAIKVMDVTGDEEEEIKQEINMLKKYSHHRNIATYYGAFIKKNPPGMDDQLWLVMEFCGAGSVTDLIKNTKGNTLKEEWIAYICREILRGLSHLHQHKVIHRDIKGQNVLLTENAEVKLVDFGVSAQLDRTVGRRNTFIGTPYWMAPEVIACDENPDATYDFKSDLWSLGITAIEMAEGAPPLCDMHPMRALFLIPRNPAPRLKSKKWSKKFQSFIESCLVKNHSQRPATEQLMKHPFIRDQPNERQVRIQLKDHIDRTKKKRGEKDETEYEYSGSEEEEEENDSGEPSSILNLPGESTLRRDFLRLQLANKERSEALRRQQLEQQQRENEEHKRQLLAERQKRIEEQKEQRRRLEEQQRREKELRKQQEREQRRHYEEQMRREEERRRAEHEQEYKRKQLEEQRQAERLQRQLKQERDYLVSLQHQRQEQRPVEKKPLYHYKEGMSPSEKPAWAKEVEERSRLNRQSSPAMPHKVANRISDPNLPPRSESFSISGVQPARTPPMLRPVDPQIPHLVAVKSQGPALTASQSVHEQPTKGLSGFQEALNVTSHRVEMPRQNSDPTSENPPLPTRIEKFDRSSWLRQEEDIPPKVPQRTTSISPALARKNSPGNGSALGPRLGSQPIRASNPDLRRTEPILESPLQRTSSGSSSSSSTPSSQPSSQGGSQPGSQAGSSERTRVRANSKSEGSPVLPHEPAKVKPEESRDITRPSRPADLTALAKELRELRIEETNRPMKKVTDYSSSSEESESSEEEEEDGESETHDGTVAVSDIPRLIPTGAPGSNEQYNVGMVGTHGLETSHADSFSGSISREGTLMIRETSGEKKRSGHSDSNGFAGHINLPDLVQQSHSPAGTPTEGLGRVSTHSQEMDSGTEYGMGSSTKASFTPFVDPRVYQTSPTDEDEEDEESSAAALFTSELLRQEQAKLNEARKISVVNVNPTNIRPHSDTPEIRKYKKRFNSEILCAALWGVNLLVGTENGLMLLDRSGQGKVYNLINRRRFQQMDVLEGLNVLVTISGKKNKLRVYYLSWLRNRILHNDPEVEKKQGWITVGDLEGCIHYKVVKYERIKFLVIALKNAVEIYAWAPKPYHKFMAFKSFADLQHKPLLVDLTVEEGQRLKVIFGSHTGFHVIDVDSGNSYDIYIPSHIQGNITPHAIVILPKTDGMEMLVCYEDEGVYVNTYGRITKDVVLQWGEMPTSVAYIHSNQIMGWGEKAIEIRSVETGHLDGVFMHKRAQRLKFLCERNDKVFFASVRSGGSSQVFFMTLNRNSMMNW

SEQ ID NO: 41 - DNA, 5651 bp, Homo sapiens
  CDS (346)..(4263)
attataacagccaatgcagccgccatccacgcacaagcaaagaagcatgtcccatttaaatacacccacgcagccccagcgcccttagccgatcggggcgctcagcccacacgcaccgctgctcggggcttggagatccgcgcaggctgggctcccggacccggcggaccgacgcgcggaggatcgggatccggcgctgtggggctggggtgggcgggggaggctgggcccggggcctctggcgcgacacccgcatgaggacgcgagtgaaatagaccaaggtggaatttccaagggaaaagcttcggggtggttttggtccatttctccagcgaagaagtagacatggcgagcgactccccggctcgaagcctggatgaaatagatctctcggctctgagggaccccgcagggatctttgaattggtggaacttgttggaaatggaacatacgggcaagtttataagggtcgtcatgtcaaaacgggccagcttgcagccatcaaggttatggatgtcacaggggatgaagaggaagaaatcaaacaagaaattaacatgttgaagaaatattctcatcaccggaatattgctacatactatggtgcttttatcaaaaagaacccaccaggcatggatgaccaactttggttggtgatggagttttgtggtgctggctctgtcaccgacctgatcaagaacacaaaaggtaacacgttgaaagaggagtggattgcatacatctgcagggaaatcttacgggggctgagtcacctgcaccagcataaagtgattcatcgagatattaaagggcaaaatgtcttgctgactgaaaatgcagaagttaaactagtggactttggagtcagtgctcagcttgatcgaacagtgggcaggaggaatactttcattggaactccctactggatggcaccagaagttattgcctgtgatgaaaacccagatgccacatatgatttcaagagtgacttgtggtctttgggtatcaccgccattgaaatggcagaaggtgctccccctctctgtgacatgcaccccatgagagctctcttcctcatcccccggaacccagcgcctcggctgaagtctaagaagtggtcaaaaaaattccagtcatttattgagagctgcttggtaaagaatcacagccagcgaccagcaacagaacaattgatgaagcatccatttatacgagaccaacctaatgagcgacaggtccgcattcaactcaaggaccatattgatagaacaaagaagaagcgaggagaaaaagatgagacagagtatgagtacagtggaagtgaggaagaagaggaggagaatgactcaggagagcccagctccatcctgaatctgccaggggagtcgacgctgcggagggactttctgaggctgcagctggccaacaaggagcgttctgaggccctacggaggcagcagctggagcagcagcagcgggagaatgaggagcacaagcggcagctgctggccgagcgtcagaagcgcatcgaggagcagaaagagcagaggcggcggctggaggagcaacaaaggcgagagaaggagctgcggaagcagcaggagagggagcagcgccggcactatgaggagcagatgcgccgggaggaggagaggaggcgtgcggagcatgaacaggaatacatcaggcgacagttagaggaggagcagagacagttagagatcttgcagcagcagctactgcatgaacaagctctacttctggaatataagcgcaaacaattggaagaacagagacaagcagaaagactgcagaggcagctaaagcaagaaagagactacttagtttcccttcagcatcagcggcaggagcagaggcctgtggagaagaagccactgtaccattacaaagaaggaatgagtcctagtgagaagccagcatgggccaaggagatcccacatctggtagctgtaaaatcccagggacctgccttgaccgcctcccagtcagtgcacgagcagcccacaaagggcctctctgggtttcaggaggctctgaacgtgacctcccaccgcgtggagatgccacgccagaactcagatcccacctcggaaaatcctcctctccccactcgcattgaaaagtttgaccgaagctcttggttacgacaggaagaagacattccaccaaaggtgcctcaaagaacaacttctatatccccagcattagccagaaagaattctcctgggaatggtagtgctctgggacccagactaggatctcaacccatcagagcaagcaaccctgatctccggagaactgagcccatcttggagagccccttgcagaggaccagcagtggcagttcctccagctccagcacccctagctcccagcccagctcccaaggaggctcccagcctggatcacaagcaggatccagtgaacgcaccagagttcgagccaacagtaagtcagaaggatcacctgtgctcccccatgagcctgccaaggtgaaaccagaagaatccagggacattacccggcccagtcgaccagctagctacaaaaaagctatagatgaggatctgacggcattagccaaagaactaagagaactccggattgaagaaacaaaccgcccaatgaagaaggtgactgattactcctcctccagtgaggagtcagaaagtagcgaggaagaggaggaagatggagagagcgagacccatgatgggacagtggctgtcagcgacatacccagactgataccaacaggagctccaggcagcaacgagcagtacaatgtgggaatggtggggacgcatgggctggagacctctcatgcggacagtttcagcggcagtatttcaagagaaggaaccttgatgattagagagacgtctggagagaagaagcgatctggccacagtgacagcaatggctttgctggccacatcaacctccctgacctggtgcagcagagccattctccagctggaaccccgactgagggactggggcgcgtctcaacccattcccaggagatggactctgggactgaatatggcatggggagcagcaccaaagcctccttcaccccctttgtggaccccagagtataccagacgtctcccactgatgaagatgaagaggatgaggaatcatcagccgcagctctgtttactagcgaacttcttaggcaagaacaggccaaactcaatgaagcaagaaagatttcggtggtaaatgtaaacccaaccaacattcggcctcatagcgacacaccagaaatcagaaaatacaagaaacgattcaactcagaaatactttgtgcagctctgtggggtgtaaaccttctggtggggactgaaaatggcctgatgcttttggaccgaagtgggcaaggcaaagtctataatctgatcaaccggaggcgatttcagcagatggatgtgctagagggactgaatgtccttgtgacaatttcaggaaagaagaataagctacgagtttactatctttcatggttaagaaacagaatactacataatgacccagaagtagaaaagaaacaaggctggatcactgttggggacttggaaggctgtatacattataaagttgttaaatatgaaaggatcaaatttttggtgattgccttaaagaatgctgtggaaatatatgcttgggctcctaaaccgtatcataaattcatggcatttaagtcttttgcagatctccagcacaagcctctgctagttgatctcacggtagaagaaggtcaaagattaaaggttatttttggttcacacactggtttccatgtaattgatgttgattcaggaaactcttatgatatctacataccatctcatattcagggcaatatcactcctcatgctattgtcatcttgcctaaaacagatggaatggaaatgcttgtttgctatgaggatgagggggtgtatgtaaacacctatggccggataactaaggatgtggtgctccaatggggagaaatgcccacgtctgtggcctacattcattccaatcagataatgggctggggcgagaaagctattgagatccggtcagtggaaacaggacatttggatggagtatttatgcataagcgagctcaaaggttaaagtttctatgtgaaagaaatgataaggtattttttgcatccgtgcgatctggaggaagtagccaagtgtttttcatgaccctcaacagaaattccatgatgaactggtaacagaagagcacttggcacttatcttcatggcgttatttctaatttaaaagaacataactcatgtggacttatgccagtctagaggcagaatcagaaggcttggttgaacatatcgctttccctttttcctctccctccgcccctcccagtacagtccatctttcaatgttgcagcctggttgagaaggagagaaaaaggtggcaggaatttccaggagatccccaagaatgctgccttgtctgtggacaaagatggaccatgtgcccttcggaattagggatagaaacaaatattgtgtgctcttaacgattaagctgtgttatggtgggttttcaggtttttaccttttttctttacccctttactctgcaagaatggggaaagaatgcatactgcgaaaatgagtcttttaaattctgtctgcctactagttttaagtatatggtatgttgtaaaatttccaatgatgagagacagcacaataaatgtaccttatctccttaggctgaaggccataactacatagtggagtaatttaagaactctcttgccttcaccaacccaaaaggttgctttttgatagcaactggctaatgaatttttaaaaagagaagaaaaatactagttttcccctcttttgggaaatagattttaaatggctaaactactagccttaaaactactagtctaataaaatcaactaccacttttgtgaatctgacaggccacatttttatatggccctttacagaatggagtgtgttgaacaggatactaacgccattgagttgagctggcctagcgatggagggacactctaacacaactttccctcagctattatgcaacagatcagggaaaaagatgggatgacagatggggtcagacagaaagagcttctgggaaacaagcttacatagtcttttttaaaatgcacaaagcctcccagctaagaggtcacttggtttgggcttcattaggactgagactttgttgagttctttctgggacttggagagtggatgatattcaggctctgaacattcccagcgctctcccgagggtgccactttctcaagatgaaaactgtgactgaaaaaattaataataaatgtttctgagctgcctgtgttctccctgtgtgggtgagagaagggactagactcctaagcctgcctcagatacaagaggcatcattggctccaattttagagaacttgaaagcaaggctttggacaaaattttgagaccctaatcactttaccttcctccaaattacccaacatacggtaaacaacatttgtgcagaagtatgtatgtatttagttcaggttgacttgtgtccttataaactcttactcaaatgatttgaactttaaaaaaaaaa

SEQ ID NO: 42 - protein, 1305 aa, Homo sapiens
MASDSPARSLDEIDLSALRDPAGIFELVELVGNGTYGQVYKGRHVKTGQLAAIKVMDVTGDEEEEIKQEINMLKKYSHHRNIATYYGAFIKKNPPGMDDQLWLVMEFCGAGSVTDLIKNTKGNTLKEEWIAYICREILRGLSHLHQHKVIHRDIKGQNVLLTENAEVKLVDFGVSAQLDRTVGRRNTFIGTPYWMAPEVIACDENPDATYDFKSDLWSLGITAIEMAEGAPPLCDMHPMRALFLIPRNPAPRLKSKKWSKKFQSFIESCLVKNHSQRPATEQLMKHPFIRDQPNERQVRIQLKDHIDRTKKKRGEKDETEYEYSGSEEEEEENDSGEPSSILNLPGESTLRRDFLRLQLANKERSEALRRQQLEQQQRENEEHKRQLLAERQKRIEEQKEQRRRLEEQQRREKELRKQQEREQRRHYEEQMRREEERRRAEHEQEYIRRQLEEEQRQLEILQQQLLHEQALLLEYKRKQLEEQRQAERLQRQLKQERDYLVSLQHQRQEQRPVEKKPLYHYKEGMSPSEKPAWAKEIPHLVAVKSQGPALTASQSVHEQPTKGLSGFQEALNVTSHRVEMPRQNSDPTSENPPLPTRIEKFDRSSWLRQEEDIPPKVPQRTTSISPALARKNSPGNGSALGPRLGSQPIRASNPDLRRTEPILESPLQRTSSGSSSSSSTPSSQPSSQGGSQPGSQAGSSERTRVRANSKSEGSPVLPHEPAKVKPEESRDITRPSRPASYKKAIDEDLTALAKELRELRIEETNRPMKKVTDYSSSSEESESSEEEEEDGESETHDGTVAVSDIPRLIPTGAPGSNEQYNVGMVGTHGLETSHADSFSGSISREGTLMIRETSGEKKRSGHSDSNGFAGHINLPDLVQQSHSPAGTPTEGLGRVSTHSQEMDSGTEYGMGSSTKASFTPFVDPRVYQTSPTDEDEEDEESSAAALFTSELLRQEQAKLNEARKISVVNVNPTNIRPHSDTPEIRKYKKRFNSEILCAALWGVNLLVGTENGLMLLDRSGQGKVYNLINRRRFQQMDVLEGLNVLVTISGKKNKLRVYYLSWLRNRILHNDPEVEKKQGWITVGDLEGCIHYKVVKYERIKFLVIALKNAVEIYAWAPKPYHKFMAFKSFADLQHKPLLVDLTVEEGQRLKVIFGSHTGFHVIDVDSGNSYDIYIPSHIQGNITPHAIVILPKTDGMEMLVCYEDEGVYVNTYGRITKDVVLQWGEMPTSVAYIHSNQIMGWGEKAIEIRSVETGHLDGVFMHKRAQRLKFLCERNDKVFFASVRSGGSSQVFFMTLNRNSMMNW

SEQ ID NO: 43 - DNA, 5627 bp, Homo sapiens
  CDS (346)..(4239)
attataacagccaatgcagccgccatccacgcacaagcaaagaagcatgtcccatttaaatacacccacgcagccccagcgcccttagccgatcggggcgctcagcccacacgcaccgctgctcggggcttggagatccgcgcaggctgggctcccggacccggcggaccgacgcgcggaggatcgggatccggcgctgtggggctggggtgggcgggggaggctgggcccggggcctctggcgcgacacccgcatgaggacgcgagtgaaatagaccaaggtggaatttccaagggaaaagcttcggggtggttttggtccatttctccagcgaagaagtagacatggcgagcgactccccggctcgaagcctggatgaaatagatctctcggctctgagggaccccgcagggatctttgaattggtggaacttgttggaaatggaacatacgggcaagtttataagggtcgtcatgtcaaaacgggccagcttgcagccatcaaggttatggatgtcacaggggatgaagaggaagaaatcaaacaagaaattaacatgttgaagaaatattctcatcaccggaatattgctacatactatggtgcttttatcaaaaagaacccaccaggcatggatgaccaactttggttggtgatggagttttgtggtgctggctctgtcaccgacctgatcaagaacacaaaaggtaacacgttgaaagaggagtggattgcatacatctgcagggaaatcttacgggggctgagtcacctgcaccagcataaagtgattcatcgagatattaaagggcaaaatgtcttgctgactgaaaatgcagaagttaaactagtggactttggagtcagtgctcagcttgatcgaacagtgggcaggaggaatactttcattggaactccctactggatggcaccagaagttattgcctgtgatgaaaacccagatgccacatatgatttcaagagtgacttgtggtctttgggtatcaccgccattgaaatggcagaaggtgctccccctctctgtgacatgcaccccatgagagctctcttcctcatcccccggaacccagcgcctcggctgaagtctaagaagtggtcaaaaaaattccagtcatttattgagagctgcttggtaaagaatcacagccagcgaccagcaacagaacaattgatgaagcatccatttatacgagaccaacctaatgagcgacaggtccgcattcaactcaaggaccatattgatagaacaaagaagaagcgaggagaaaaagatgagacagagtatgagtacagtggaagtgaggaagaagaggaggagaatgactcaggagagcccagctccatcctgaatctgccaggggagtcgacgctgcggagggactttctgaggctgcagctggccaacaaggagcgttctgaggccctacggaggcagcagctggagcagcagcagcgggagaatgaggagcacaagcggcagctgctggccgagcgtcagaagcgcatcgaggagcagaaagagcagaggcggcggctggaggagcaacaaaggcgagagaaggagctgcggaagcagcaggagagggagcagcgccggcactatgaggagcagatgcgccgggaggaggagaggaggcgtgcggagcatgaacaggaatacatcaggcgacagttagaggaggagcagagacagttagagatcttgcagcagcagctactgcatgaacaagctctacttctggaatataagcgcaaacaattggaagaacagagacaagcagaaagactgcagaggcagctaaagcaagaaagagactacttagtttcccttcagcatcagcggcaggagcagaggcctgtggagaagaagccactgtaccattacaaagaaggaatgagtcctagtgagaagccagcatgggccaaggagatcccacatctggtagctgtaaaatcccagggacctgccttgaccgcctcccagtcagtgcacgagcagcccacaaagggcctctctgggtttcaggaggctctgaacgtgacctcccaccgcgtggagatgccacgccagaactcagatcccacctcggaaaatcctcctctccccactcgcattgaaaagtttgaccgaagctcttggttacgacaggaagaagacattccaccaaaggtgcctcaaagaacaacttctatatccccagcattagccagaaagaattctcctgggaatggtagtgctctgggacccagactaggatctcaacccatcagagcaagcaaccctgatctccggagaactgagcccatcttggagagccccttgcagaggaccagcagtggcagttcctccagctccagcacccctagctcccagcccagctcccaaggaggctcccagcctggatcacaagcaggatccagtgaacgcaccagagttcgagccaacagtaagtcagaaggatcacctgtgctcccccatgagcctgccaaggtgaaaccagaagaatccagggacattacccggcccagtcgaccagctgatctgacggcattagccaaagaactaagagaactccggattgaagaaacaaaccgcccaatgaagaaggtgactgattactcctcctccagtgaggagtcagaaagtagcgaggaagaggaggaagatggagagagcgagacccatgatgggacagtggctgtcagcgacatacccagactgataccaacaggagctccaggcagcaacgagcagtacaatgtgggaatggtggggacgcatgggctggagacctctcatgcggacagtttcagcggcagtatttcaagagaaggaaccttgatgattagagagacgtctggagagaagaagcgatctggccacagtgacagcaatggctttgctggccacatcaacctccctgacctggtgcagcagagccattctccagctggaaccccgactgagggactggggcgcgtctcaacccattcccaggagatggactctgggactgaatatggcatggggagcagcaccaaagcctccttcaccccctttgtggaccccagagtataccagacgtctcccactgatgaagatgaagaggatgaggaatcatcagccgcagctctgtttactagcgaacttcttaggcaagaacaggccaaactcaatgaagcaagaaagatttcggtggtaaatgtaaacccaaccaacattcggcctcatagcgacacaccagaaatcagaaaatacaagaaacgattcaactcagaaatactttgtgcagctctgtggggtgtaaaccttctggtggggactgaaaatggcctgatgcttttggaccgaagtgggcaaggcaaagtctataatctgatcaaccggaggcgatttcagcagatggatgtgctagagggactgaatgtccttgtgacaatttcaggaaagaagaataagctacgagtttactatctttcatggttaagaaacagaatactacataatgacccagaagtagaaaagaaacaaggctggatcactgttggggacttggaaggctgtatacattataaagttgttaaatatgaaaggatcaaatttttggtgattgccttaaagaatgctgtggaaatatatgcttgggctcctaaaccgtatcataaattcatggcatttaagtcttttgcagatctccagcacaagcctctgctagttgatctcacggtagaagaaggtcaaagattaaaggttatttttggttcacacactggtttccatgtaattgatgttgattcaggaaactcttatgatatctacataccatctcatattcagggcaatatcactcctcatgctattgtcatcttgcctaaaacagatggaatggaaatgcttgtttgctatgaggatgagggggtgtatgtaaacacctatggccggataactaaggatgtggtgctccaatggggagaaatgcccacgtctgtggcctacattcattccaatcagataatgggctggggcgagaaagctattgagatccggtcagtggaaacaggacatttggatggagtatttatgcataagcgagctcaaaggttaaagtttctatgtgaaagaaatgataaggtattttttgcatccgtgcgatctggaggaagtagccaagtgtttttcatgaccctcaacagaaattccatgatgaactggtaacagaagagcacttggcacttatcttcatggcgttatttctaatttaaaagaacataactcatgtggacttatgccagtctagaggcagaatcagaaggcttggttgaacatatcgctttccctttttcctctccctccgcccctcccagtacagtccatctttcaatgttgcagcctggttgagaaggagagaaaaaggtggcaggaatttccaggagatccccaagaatgctgccttgtctgtggacaaagatggaccatgtgcccttcggaattagggatagaaacaaatattgtgtgctcttaacgattaagctgtgttatggtgggttttcaggtttttaccttttttctttacccctttactctgcaagaatggggaaagaatgcatactgcgaaaatgagtcttttaaattctgtctgcctactagttttaagtatatggtatgttgtaaaatttccaatgatgagagacagcacaataaatgtaccttatctccttaggctgaaggccataactacatagtggagtaatttaagaactctcttgccttcaccaacccaaaaggttgctttttgatagcaactggctaatgaatttttaaaaagagaagaaaaatactagttttcccctcttttgggaaatagattttaaatggctaaactactagccttaaaactactagtctaataaaatcaactaccacttttgtgaatctgacaggccacatttttatatggccctttacagaatggagtgtgttgaacaggatactaacgccattgagttgagctggcctagcgatggagggacactctaacacaactttccctcagctattatgcaacagatcagggaaaaagatgggatgacagatggggtcagacagaaagagcttctgggaaacaagcttacatagtcttttttaaaatgcacaaagcctcccagctaagaggtcacttggtttgggcttcattaggactgagactttgttgagttctttctgggacttggagagtggatgatattcaggctctgaacattcccagcgctctcccgagggtgccactttctcaagatgaaaactgtgactgaaaaaattaataataaatgtttctgagctgcctgtgttctccctgtgtgggtgagagaagggactagactcctaagcctgcctcagatacaagaggcatcattggctccaattttagagaacttgaaagcaaggctttggacaaaattttgagaccctaatcactttaccttcctccaaattacccaacatacggtaaacaacatttgtgcagaagtatgtatgtatttagttcaggttgacttgtgtccttataaactcttactcaaatgatttgaactttaaaaaaaaaa

SEQ ID NO: 44 - protein, 1297 aa, Homo sapiens
MASDSPARSLDEIDLSALRDPAGIFELVELVGNGTYGQVYKGRHVKTGQLAAIKVMDVTGDEEEEIKQEINMLKKYSHHRNIATYYGAFIKKNPPGMDDQLWLVMEFCGAGSVTDLIKNTKGNTLKEEWIAYICREILRGLSHLHQHKVIHRDIKGQNVLLTENAEVKLVDFGVSAQLDRTVGRRNTFIGTPYWMAPEVIACDENPDATYDFKSDLWSLGITAIEMAEGAPPLCDMHPMRALFLIPRNPAPRLKSKKWSKKFQSFIESCLVKNHSQRPATEQLMKHPFIRDQPNERQVRIQLKDHIDRTKKKRGEKDETEYEYSGSEEEEEENDSGEPSSILNLPGESTLRRDFLRLQLANKERSEALRRQQLEQQQRENEEHKRQLLAERQKRIEEQKEQRRRLEEQQRREKELRKQQEREQRRHYEEQMRREEERRRAEHEQEYIRRQLEEEQRQLEILQQQLLHEQALLLEYKRKQLEEQRQAERLQRQLKQERDYLVSLQHQRQEQRPVEKKPLYHYKEGMSPSEKPAWAKEIPHLVAVKSQGPALTASQSVHEQPTKGLSGFQEALNVTSHRVEMPRQNSDPTSENPPLPTRIEKFDRSSWLRQEEDIPPKVPQRTTSISPALARKNSPGNGSALGPRLGSQPIRASNPDLRRTEPILESPLQRTSSGSSSSSSTPSSQPSSQGGSQPGSQAGSSERTRVRANSKSEGSPVLPHEPAKVKPEESRDITRPSRPADLTALAKELRELRIEETNRPMKKVTDYSSSSEESESSEEEEEDGESETHDGTVAVSDIPRLIPTGAPGSNEQYNVGMVGTHGLETSHADSFSGSISREGTLMIRETSGEKKRSGHSDSNGFAGHINLPDLVQQSHSPAGTPTEGLGRVSTHSQEMDSGTEYGMGSSTKASFTPFVDPRVYQTSPTDEDEEDEESSAAALFTSELLRQEQAKLNEARKISVVNVNPTNIRPHSDTPEIRKYKKRFNSEILCAALWGVNLLVGTENGLMLLDRSGQGKVYNLINRRRFQQMDVLEGLNVLVTISGKKNKLRVYYLSWLRNRILHNDPEVEKKQGWITVGDLEGCIHYKVVKYERIKFLVIALKNAVEIYAWAPKPYHKFMAFKSFADLQHKPLLVDLTVEEGQRLKVIFGSHTGFHVIDVDSGNSYDIYIPSHIQGNITPHAIVILPKTDGMEMLVCYEDEGVYVNTYGRITKDVVLQWGEMPTSVAYIHSNQIMGWGEKAIEIRSVETGHLDGVFMHKRAQRLKFLCERNDKVFFASVRSGGSSQVFFMTLNRNSMMNW

SEQ ID NO: 45 - DNA, 5564 bp, Homo sapiens
  CDS (346)..(4176)
attataacagccaatgcagccgccatccacgcacaagcaaagaagcatgtcccatttaaatacacccacgcagccccagcgcccttagccgatcggggcgctcagcccacacgcaccgctgctcggggcttggagatccgcgcaggctgggctcccggacccggcggaccgacgcgcggaggatcgggatccggcgctgtggggctggggtgggcgggggaggctgggcccggggcctctggcgcgacacccgcatgaggacgcgagtgaaatagaccaaggtggaatttccaagggaaaagcttcggggtggttttggtccatttctccagcgaagaagtagacatggcgagcgactccccggctcgaagcctggatgaaatagatctctcggctctgagggaccccgcagggatctttgaattggtggaacttgttggaaatggaacatacgggcaagtttataagggtcgtcatgtcaaaacgggccagcttgcagccatcaaggttatggatgtcacaggggatgaagaggaagaaatcaaacaagaaattaacatgttgaagaaatattctcatcaccggaatattgctacatactatggtgcttttatcaaaaagaacccaccaggcatggatgaccaactttggttggtgatggagttttgtggtgctggctctgtcaccgacctgatcaagaacacaaaaggtaacacgttgaaagaggagtggattgcatacatctgcagggaaatcttacgggggctgagtcacctgcaccagcataaagtgattcatcgagatattaaagggcaaaatgtcttgctgactgaaaatgcagaagttaaactagtggactttggagtcagtgctcagcttgatcgaacagtgggcaggaggaatactttcattggaactccctactggatggcaccagaagttattgcctgtgatgaaaacccagatgccacatatgatttcaagagtgacttgtggtctttgggtatcaccgccattgaaatggcagaaggtgctccccctctctgtgacatgcaccccatgagagctctcttcctcatcccccggaacccagcgcctcggctgaagtctaagaagtggtcaaaaaaattccagtcatttattgagagctgcttggtaaagaatcacagccagcgaccagcaacagaacaattgatgaagcatccatttatacgagaccaacctaatgagcgacaggtccgcattcaactcaaggaccatattgatagaacaaagaagaagcgaggagaaaaagatgagacagagtatgagtacagtggaagtgaggaagaagaggaggagaatgactcaggagagcccagctccatcctgaatctgccaggggagtcgacgctgcggagggactttctgaggctgcagctggccaacaaggagcgttctgaggccctacggaggcagcagctggagcagcagcagcgggagaatgaggagcacaagcggcagctgctggccgagcgtcagaagcgcatcgaggagcagaaagagcagaggcggcggctggaggagcaacaaaggcgagagaaggagctgcggaagcagcaggagagggagcagcgccggcactatgaggagcagatgcgccgggaggaggagaggaggcgtgcggagcatgaacaggaatataagcgcaaacaattggaagaacagagacaagcagaaagactgcagaggcagctaaagcaagaaagagactacttagtttcccttcagcatcagcggcaggagcagaggcctgtggagaagaagccactgtaccattacaaagaaggaatgagtcctagtgagaagccagcatgggccaaggagatcccacatctggtagctgtaaaatcccagggacctgccttgaccgcctcccagtcagtgcacgagcagcccacaaagggcctctctgggtttcaggaggctctgaacgtgacctcccaccgcgtggagatgccacgccagaactcagatcccacctcggaaaatcctcctctccccactcgcattgaaaagtttgaccgaagctcttggttacgacaggaagaagacattccaccaaaggtgcctcaaagaacaacttctatatccccagcattagccagaaagaattctcctgggaatggtagtgctctgggacccagactaggatctcaacccatcagagcaagcaaccctgatctccggagaactgagcccatcttggagagccccttgcagaggaccagcagtggcagttcctccagctccagcacccctagctcccagcccagctcccaaggaggctcccagcctggatcacaagcaggatccagtgaacgcaccagagttcgagccaacagtaagtcagaaggatcacctgtgctcccccatgagcctgccaaggtgaaaccagaagaatccagggacattacccggcccagtcgaccagctagctacaaaaaagctatagatgaggatctgacggcattagccaaagaactaagagaactccggattgaagaaacaaaccgcccaatgaagaaggtgactgattactcctcctccagtgaggagtcagaaagtagcgaggaagaggaggaagatggagagagcgagacccatgatgggacagtggctgtcagcgacatacccagactgataccaacaggagctccaggcagcaacgagcagtacaatgtgggaatggtggggacgcatgggctggagacctctcatgcggacagtttcagcggcagtatttcaagagaaggaaccttgatgattagagagacgtctggagagaagaagcgatctggccacagtgacagcaatggctttgctggccacatcaacctccctgacctggtgcagcagagccattctccagctggaaccccgactgagggactggggcgcgtctcaacccattcccaggagatggactctgggactgaatatggcatggggagcagcaccaaagcctccttcaccccctttgtggaccccagagtataccagacgtctcccactgatgaagatgaagaggatgaggaatcatcagccgcagctctgtttactagcgaacttcttaggcaagaacaggccaaactcaatgaagcaagaaagatttcggtggtaaatgtaaacccaaccaacattcggcctcatagcgacacaccagaaatcagaaaatacaagaaacgattcaactcagaaatactttgtgcagctctgtggggtgtaaaccttctggtggggactgaaaatggcctgatgcttttggaccgaagtgggcaaggcaaagtctataatctgatcaaccggaggcgatttcagcagatggatgtgctagagggactgaatgtccttgtgacaatttcaggaaagaagaataagctacgagtttactatctttcatggttaagaaacagaatactacataatgacccagaagtagaaaagaaacaaggctggatcactgttggggacttggaaggctgtatacattataaagttgttaaatatgaaaggatcaaatttttggtgattgccttaaagaatgctgtggaaatatatgcttgggctcctaaaccgtatcataaattcatggcatttaagtcttttgcagatctccagcacaagcctctgctagttgatctcacggtagaagaaggtcaaagattaaaggttatttttggttcacacactggtttccatgtaattgatgttgattcaggaaactcttatgatatctacataccatctcatattcagggcaatatcactcctcatgctattgtcatcttgcctaaaacagatggaatggaaatgcttgtttgctatgaggatgagggggtgtatgtaaacacctatggccggataactaaggatgtggtgctccaatggggagaaatgcccacgtctgtggcctacattcattccaatcagataatgggctggggcgagaaagctattgagatccggtcagtggaaacaggacatttggatggagtatttatgcataagcgagctcaaaggttaaagtttctatgtgaaagaaatgataaggtattttttgcatccgtgcgatctggaggaagtagccaagtgtttttcatgaccctcaacagaaattccatgatgaactggtaacagaagagcacttggcacttatcttcatggcgttatttctaatttaaaagaacataactcatgtggacttatgccagtctagaggcagaatcagaaggcttggttgaacatatcgctttccctttttcctctccctccgcccctcccagtacagtccatctttcaatgttgcagcctggttgagaaggagagaaaaaggtggcaggaatttccaggagatccccaagaatgctgccttgtctgtggacaaagatggaccatgtgcccttcggaattagggatagaaacaaatattgtgtgctcttaacgattaagctgtgttatggtgggttttcaggtttttaccttttttctttacccctttactctgcaagaatggggaaagaatgcatactgcgaaaatgagtcttttaaattctgtctgcctactagttttaagtatatggtatgttgtaaaatttccaatgatgagagacagcacaataaatgtaccttatctccttaggctgaaggccataactacatagtggagtaatttaagaactctcttgccttcaccaacccaaaaggttgctttttgatagcaactggctaatgaatttttaaaaagagaagaaaaatactagttttcccctcttttgggaaatagattttaaatggctaaactactagccttaaaactactagtctaataaaatcaactaccacttttgtgaatctgacaggccacatttttatatggccctttacagaatggagtgtgttgaacaggatactaacgccattgagttgagctggcctagcgatggagggacactctaacacaactttccctcagctattatgcaacagatcagggaaaaagatgggatgacagatggggtcagacagaaagagcttctgggaaacaagcttacatagtcttttttaaaatgcacaaagcctcccagctaagaggtcacttggtttgggcttcattaggactgagactttgttgagttctttctgggacttggagagtggatgatattcaggctctgaacattcccagcgctctcccgagggtgccactttctcaagatgaaaactgtgactgaaaaaattaataataaatgtttctgagctgcctgtgttctccctgtgtgggtgagagaagggactagactcctaagcctgcctcagatacaagaggcatcattggctccaattttagagaacttgaaagcaaggctttggacaaaattttgagaccctaatcactttaccttcctccaaattacccaacatacggtaaacaacatttgtgcagaagtatgtatgtatttagttcaggttgacttgtgtccttataaactcttactcaaatgatttgaactttaaaaaaaaaa

SEQ ID NO: 46 - protein, 1276 aa, Homo sapiens
MASDSPARSLDEIDLSALRDPAGIFELVELVGNGTYGQVYKGRHVKTGQLAAIKVMDVTGDEEEEIKQEINMLKKYSHHRNIATYYGAFIKKNPPGMDDQLWLVMEFCGAGSVTDLIKNTKGNTLKEEWIAYICREILRGLSHLHQHKVIHRDIKGQNVLLTENAEVKLVDFGVSAQLDRTVGRRNTFIGTPYWMAPEVIACDENPDATYDFKSDLWSLGITAIEMAEGAPPLCDMHPMRALFLIPRNPAPRLKSKKWSKKFQSFIESCLVKNHSQRPATEQLMKHPFIRDQPNERQVRIQLKDHIDRTKKKRGEKDETEYEYSGSEEEEEENDSGEPSSILNLPGESTLRRDFLRLQLANKERSEALRRQQLEQQQRENEEHKRQLLAERQKRIEEQKEQRRRLEEQQRREKELRKQQEREQRRHYEEQMRREEERRRAEHEQEYKRKQLEEQRQAERLQRQLKQERDYLVSLQHQRQEQRPVEKKPLYHYKEGMSPSEKPAWAKEIPHLVAVKSQGPALTASQSVHEQPTKGLSGFQEALNVTSHRVEMPRQNSDPTSENPPLPTRIEKFDRSSWLRQEEDIPPKVPQRTTSISPALARKNSPGNGSALGPRLGSQPIRASNPDLRRTEPILESPLQRTSSGSSSSSSTPSSQPSSQGGSQPGSQAGSSERTRVRANSKSEGSPVLPHEPAKVKPEESRDITRPSRPASYKKAIDEDLTALAKELRELRIEETNRPMKKVTDYSSSSEESESSEEEEEDGESETHDGTVAVSDIPRLIPTGAPGSNEQYNVGMVGTHGLETSHADSFSGSISREGTLMIRETSGEKKRSGHSDSNGFAGHINLPDLVQQSHSPAGTPTEGLGRVSTHSQEMDSGTEYGMGSSTKASFTPFVDPRVYQTSPTDEDEEDEESSAAALFTSELLRQEQAKLNEARKISVVNVNPTNIRPHSDTPEIRKYKKRFNSEILCAALWGVNLLVGTENGLMLLDRSGQGKVYNLINRRRFQQMDVLEGLNVLVTISGKKNKLRVYYLSWLRNRILHNDPEVEKKQGWITVGDLEGCIHYKVVKYERIKFLVIALKNAVEIYAWAPKPYHKFMAFKSFADLQHKPLLVDLTVEEGQRLKVIFGSHTGFHVIDVDSGNSYDIYIPSHIQGNITPHAIVILPKTDGMEMLVCYEDEGVYVNTYGRITKDVVLQWGEMPTSVAYIHSNQIMGWGEKAIEIRSVETGHLDGVFMHKRAQRLKFLCERNDKVFFASVRSGGSSQVFFMTLNRNSMMNW

SEQ ID NO: 47 - DNA, 5540 bp, Homo sapiens
  CDS (346)..(4152)
attataacagccaatgcagccgccatccacgcacaagcaaagaagcatgtcccatttaaatacacccacgcagccccagcgcccttagccgatcggggcgctcagcccacacgcaccgctgctcggggcttggagatccgcgcaggctgggctcccggacccggcggaccgacgcgcggaggatcgggatccggcgctgtggggctggggtgggcgggggaggctgggcccggggcctctggcgcgacacccgcatgaggacgcgagtgaaatagaccaaggtggaatttccaagggaaaagcttcggggtggttttggtccatttctccagcgaagaagtagacatggcgagcgactccccggctcgaagcctggatgaaatagatctctcggctctgagggaccccgcagggatctttgaattggtggaacttgttggaaatggaacatacgggcaagtttataagggtcgtcatgtcaaaacgggccagcttgcagccatcaaggttatggatgtcacaggggatgaagaggaagaaatcaaacaagaaattaacatgttgaagaaatattctcatcaccggaatattgctacatactatggtgcttttatcaaaaagaacccaccaggcatggatgaccaactttggttggtgatggagttttgtggtgctggctctgtcaccgacctgatcaagaacacaaaaggtaacacgttgaaagaggagtggattgcatacatctgcagggaaatcttacgggggctgagtcacctgcaccagcataaagtgattcatcgagatattaaagggcaaaatgtcttgctgactgaaaatgcagaagttaaactagtggactttggagtcagtgctcagcttgatcgaacagtgggcaggaggaatactttcattggaactccctactggatggcaccagaagttattgcctgtgatgaaaacccagatgccacatatgatttcaagagtgacttgtggtctttgggtatcaccgccattgaaatggcagaaggtgctccccctctctgtgacatgcaccccatgagagctctcttcctcatcccccggaacccagcgcctcggctgaagtctaagaagtggtcaaaaaaattccagtcatttattgagagctgcttggtaaagaatcacagccagcgaccagcaacagaacaattgatgaagcatccatttatacgagaccaacctaatgagcgacaggtccgcattcaactcaaggaccatattgatagaacaaagaagaagcgaggagaaaaagatgagacagagtatgagtacagtggaagtgaggaagaagaggaggagaatgactcaggagagcccagctccatcctgaatctgccaggggagtcgacgctgcggagggactttctgaggctgcagctggccaacaaggagcgttctgaggccctacggaggcagcagctggagcagcagcagcgggagaatgaggagcacaagcggcagctgctggccgagcgtcagaagcgcatcgaggagcagaaagagcagaggcggcggctggaggagcaacaaaggcgagagaaggagctgcggaagcagcaggagagggagcagcgccggcactatgaggagcagatgcgccgggaggaggagaggaggcgtgcggagcatgaacaggaatataagcgcaaacaattggaagaacagagacaagcagaaagactgcagaggcagctaaagcaagaaagagactacttagtttcccttcagcatcagcggcaggagcagaggcctgtggagaagaagccactgtaccattacaaagaaggaatgagtcctagtgagaagccagcatgggccaaggagatcccacatctggtagctgtaaaatcccagggacctgccttgaccgcctcccagtcagtgcacgagcagcccacaaagggcctctctgggtttcaggaggctctgaacgtgacctcccaccgcgtggagatgccacgccagaactcagatcccacctcggaaaatcctcctctccccactcgcattgaaaagtttgaccgaagctcttggttacgacaggaagaagacattccaccaaaggtgcctcaaagaacaacttctatatccccagcattagccagaaagaattctcctgggaatggtagtgctctgggacccagactaggatctcaacccatcagagcaagcaaccctgatctccggagaactgagcccatcttggagagccccttgcagaggaccagcagtggcagttcctccagctccagcacccctagctcccagcccagctcccaaggaggctcccagcctggatcacaagcaggatccagtgaacgcaccagagttcgagccaacagtaagtcagaaggatcacctgtgctcccccatgagcctgccaaggtgaaaccagaagaatccagggacattacccggcccagtcgaccagctgatctgacggcattagccaaagaactaagagaactccggattgaagaaacaaaccgcccaatgaagaaggtgactgattactcctcctccagtgaggagtcagaaagtagcgaggaagaggaggaagatggagagagcgagacccatgatgggacagtggctgtcagcgacatacccagactgataccaacaggagctccaggcagcaacgagcagtacaatgtgggaatggtggggacgcatgggctggagacctctcatgcggacagtttcagcggcagtatttcaagagaaggaaccttgatgattagagagacgtctggagagaagaagcgatctggccacagtgacagcaatggctttgctggccacatcaacctccctgacctggtgcagcagagccattctccagctggaaccccgactgagggactggggcgcgtctcaacccattcccaggagatggactctgggactgaatatggcatggggagcagcaccaaagcctccttcaccccctttgtggaccccagagtataccagacgtctcccactgatgaagatgaagaggatgaggaatcatcagccgcagctctgtttactagcgaacttcttaggcaagaacaggccaaactcaatgaagcaagaaagatttcggtggtaaatgtaaacccaaccaacattcggcctcatagcgacacaccagaaatcagaaaatacaagaaacgattcaactcagaaatactttgtgcagctctgtggggtgtaaaccttctggtggggactgaaaatggcctgatgcttttggaccgaagtgggcaaggcaaagtctataatctgatcaaccggaggcgatttcagcagatggatgtgctagagggactgaatgtccttgtgacaatttcaggaaagaagaataagctacgagtttactatctttcatggttaagaaacagaatactacataatgacccagaagtagaaaagaaacaaggctggatcactgttggggacttggaaggctgtatacattataaagttgttaaatatgaaaggatcaaatttttggtgattgccttaaagaatgctgtggaaatatatgcttgggctcctaaaccgtatcataaattcatggcatttaagtcttttgcagatctccagcacaagcctctgctagttgatctcacggtagaagaaggtcaaagattaaaggttatttttggttcacacactggtttccatgtaattgatgttgattcaggaaactcttatgatatctacataccatctcatattcagggcaatatcactcctcatgctattgtcatcttgcctaaaacagatggaatggaaatgcttgtttgctatgaggatgagggggtgtatgtaaacacctatggccggataactaaggatgtggtgctccaatggggagaaatgcccacgtctgtggcctacattcattccaatcagataatgggctggggcgagaaagctattgagatccggtcagtggaaacaggacatttggatggagtatttatgcataagcgagctcaaaggttaaagtttctatgtgaaagaaatgataaggtattttttgcatccgtgcgatctggaggaagtagccaagtgtttttcatgaccctcaacagaaattccatgatgaactggtaacagaagagcacttggcacttatcttcatggcgttatttctaatttaaaagaacataactcatgtggacttatgccagtctagaggcagaatcagaaggcttggttgaacatatcgctttccctttttcctctccctccgcccctcccagtacagtccatctttcaatgttgcagcctggttgagaaggagagaaaaaggtggcaggaatttccaggagatccccaagaatgctgccttgtctgtggacaaagatggaccatgtgcccttcggaattagggatagaaacaaatattgtgtgctcttaacgattaagctgtgttatggtgggttttcaggtttttaccttttttctttacccctttactctgcaagaatggggaaagaatgcatactgcgaaaatgagtcttttaaattctgtctgcctactagttttaagtatatggtatgttgtaaaatttccaatgatgagagacagcacaataaatgtaccttatctccttaggctgaaggccataactacatagtggagtaatttaagaactctcttgccttcaccaacccaaaaggttgctttttgatagcaactggctaatgaatttttaaaaagagaagaaaaatactagttttcccctcttttgggaaatagattttaaatggctaaactactagccttaaaactactagtctaataaaatcaactaccacttttgtgaatctgacaggccacatttttatatggccctttacagaatggagtgtgttgaacaggatactaacgccattgagttgagctggcctagcgatggagggacactctaacacaactttccctcagctattatgcaacagatcagggaaaaagatgggatgacagatggggtcagacagaaagagcttctgggaaacaagcttacatagtcttttttaaaatgcacaaagcctcccagctaagaggtcacttggtttgggcttcattaggactgagactttgttgagttctttctgggacttggagagtggatgatattcaggctctgaacattcccagcgctctcccgagggtgccactttctcaagatgaaaactgtgactgaaaaaattaataataaatgtttctgagctgcctgtgttctccctgtgtgggtgagagaagggactagactcctaagcctgcctcagatacaagaggcatcattggctccaattttagagaacttgaaagcaaggctttggacaaaattttgagaccctaatcactttaccttcctccaaattacccaacatacggtaaacaacatttgtgcagaagtatgtatgtatttagttcaggttgacttgtgtccttataaactcttactcaaatgatttgaactttaaaaaaaaaa

SEQ ID NO: 48 - protein, 1268 aa, Homo sapiens
MASDSPARSLDEIDLSALRDPAGIFELVELVGNGTYGQVYKGRHVKTGQLAAIKVMDVTGDEEEEIKQEINMLKKYSHHRNIATYYGAFIKKNPPGMDDQLWLVMEFCGAGSVTDLIKNTKGNTLKEEWIAYICREILRGLSHLHQHKVIHRDIKGQNVLLTENAEVKLVDFGVSAQLDRTVGRRNTFIGTPYWMAPEVIACDENPDATYDFKSDLWSLGITAIEMAEGAPPLCDMHPMRALFLIPRNPAPRLKSKKWSKKFQSFIESCLVKNHSQRPATEQLMKHPFIRDQPNERQVRIQLKDHIDRTKKKRGEKDETEYEYSGSEEEEEENDSGEPSSILNLPGESTLRRDFLRLQLANKERSEALRRQQLEQQQRENEEHKRQLLAERQKRIEEQKEQRRRLEEQQRREKELRKQQEREQRRHYEEQMRREEERRRAEHEQEYKRKQLEEQRQAERLQRQLKQERDYLVSLQHQRQEQRPVEKKPLYHYKEGMSPSEKPAWAKEIPHLVAVKSQGPALTASQSVHEQPTKGLSGFQEALNVTSHRVEMPRQNSDPTSENPPLPTRIEKFDRSSWLRQEEDIPPKVPQRTTSISPALARKNSPGNGSALGPRLGSQPIRASNPDLRRTEPILESPLQRTSSGSSSSSSTPSSQPSSQGGSQPGSQAGSSERTRVRANSKSEGSPVLPHEPAKVKPEESRDITRPSRPADLTALAKELRELRIEETNRPMKKVTDYSSSSEESESSEEEEEDGESETHDGTVAVSDIPRLIPTGAPGSNEQYNVGMVGTHGLETSHADSFSGSISREGTLMIRETSGEKKRSGHSDSNGFAGHINLPDLVQQSHSPAGTPTEGLGRVSTHSQEMDSGTEYGMGSSTKASFTPFVDPRVYQTSPTDEDEEDEESSAAALFTSELLRQEQAKLNEARKISVVNVNPTNIRPHSDTPEIRKYKKRFNSEILCAALWGVNLLVGTENGLMLLDRSGQGKVYNLINRRRFQQMDVLEGLNVLVTISGKKNKLRVYYLSWLRNRILHNDPEVEKKQGWITVGDLEGCIHYKVVKYERIKFLVIALKNAVEIYAWAPKPYHKFMAFKSFADLQHKPLLVDLTVEEGQRLKVIFGSHTGFHVIDVDSGNSYDIYIPSHIQGNITPHAIVILPKTDGMEMLVCYEDEGVYVNTYGRITKDVVLQWGEMPTSVAYIHSNQIMGWGEKAIEIRSVETGHLDGVFMHKRAQRLKFLCERNDKVFFASVRSGGSSQVFFMTLNRNSMMNW

SEQ ID NO: 49 - DNA, 4312 bp, Homo sapiens
  CDS (127)..(4071)
aagcgtgcgcgtgatttggccctgaacggacgccgtagccaagaggttgggcggatgttgtgagccgggtcgctgcggccgaggctccggcccccaggaccactggctgcccatgagagatgaaggatggcatccaagggggccggcatgtctttctcccgcaagagctataggctgacctcagatgctgagaaatccagggtcacaggcattgtgcaggagaagctgctgaatgactacctgaaccgcatcttttcctcttctgaacatgcacccccagcagccaccagcaggaaacccctgaacttccagaacctgccagaacatttggaccagttgctacaggtggacaatgaggaggaggaaagccagggacaggttgaagggcggcttggcccatccactgtggtcctggaccacacaggcggctttgaggggcttctcctggtggatgatgacctgctgggggtgattggacacagcaactttggcaccatccgctctaccacatgcgtgtacaaagggaaatggctctacgaggtcctcatctcctcccaggggctcatgcagatcggctggtgcaccatcagctgccgcttcaaccaggaggagggggttggagatacacacaactcctatgcctatgatggcaaccgcgtgcgcaagtggaatgtgaccacaacgaattatggcaaggcgtgggcagcgggggacatcgtgagctgcctgattgacctggatgatggcactctgtccttctgcctgaacggtgtatcactgggcactgcctttgagaacctgtccaggggcctgggtatggcctacttcccagccatcagcctctctttcaaggagtccgtggccttcaactttggcagccgtcctctgcgctacccagtggcaggctaccggcccctgcaggacccaccgagtgctgacctggtgcgggcacagaggttgctgggctgcttccgggcagtgctgagtgtggagctggaccctgtggaggggcggctgttggacaaggagagctccaagtggcggttgcggggccagcccaccgtcctcctcacactggcccacatcttccatcactttgcaccgcttctgcgcaaggtgtatctggtggaggctgtgctcatgagcttcttgctgggcatcgtggagaagggcacacccacacaggcacagtccgtggtgcaccaggtcctggacctcttgtggctcttcatggaggactacgaggtacaagattgcctcaagcagttgatgatgtctctgcttcggctgtaccgattctcacccattgtcccagacctgggcctacagatccattacctgcggctcactatcgccatcctgaggcatgagaagtcccgcaagtttctgcttagcaatgtcctcttcgacgtgctccgctccgtcgtcttcttttacatcaagagccccctgcgtgtggaggaggccggcctgcaggagctcattcccaccacctggtggccccactgctccagtagggagggcaaagagagcacggagatgaaggaggagaccgcagaggagcggctgcggcggcgagcctacgaacggggctgtcagcggctcaggaagcgcatcgaagtggtggaagaactacaggtccagatcctgaagctgctgctggacaataaagatgacaatgggggtgaagcttctaggtatatcttcctgaccaagtttcgcaagtttctgcaggagaacgccagtggccgggggaacatgcccatgctctgcccccctgagtacatggtctgcttcttacaccggctgatctctgccctgcgctactattgggatgaatacaaggcttccaatcctcatgcttccttcagtgaggaggcctacatcccgccccaggtcttctataatggcaaggtggactactttgacctgcagcgcctggggggcctcctctcgcacctgcggaagaccctcaaagatgaccttgcttccaaagccaacattgtgatcgacccactggagctccagtcaaccgccatggatgacctagatgaggatgaggagccagccccagctatggcccagcgccccatgcaggccctggctgttggggggccactgcccctgccccggcccggctggctcagttctccaactttgggccgagccaaccgcttcctcagcacagcggctgtgagcctcatgaccccacggcggcctctgagcacctcggagaaagtgaaggtccgcacgctgagcgtggagcagaggacccgtgaggacattgaaggcagccactggaatgagggcttgctgctggggcggccccccgaggagcctgagcagcccctcaccgagaactcgctgctggaagtcctggatggggcggtcatgatgtacaacctcagcgtacaccagcagctgggcaagatggtgggtgtctccgatgatgtcaatgaatacgctatggctctgagggacacagaggacaagctccgccggtgccccaagaggaggaaggacatccttgcagagttgaccaagagccagaaggttttctcagaaaagctggaccacctgagccgccgtcttgcctgggtccatgccactgtctactcccaggagaagatgctggacatctactggctgctgcgcgtctgcctgcggaccattgagcacggtgatcgcacagggtctctctttgccttcatgcccgagttctacctgagcgtggccatcaacagctacagtgctctcaagaattactttggtcccgtgcacagcatggaggagctcccaggctatgaagagaccctgacccgcctggctgccattctcgccaaacactttgccgacgcacgcattgtgggcactgacatccgagactcactgatgcaggccctggccagctacgtgtgctacccacactccctgcgggctgtggagcgaatccccgaggagcagcgtatcgccatggtgaggaacctcctggcgccctatgagcagcggccctgggcccagaccaactggatcctggtgcggctctggaggggctgtggcttcgggtaccgctatacacggctgccacatctgctgaaaaccaaacttgaggacgccaatttgcccagcctccagaagccctgcccttccaccctgctgcagcagcacatggcggacctcctacagcagggtcctgatgtggcacccagcttcctcaacagcgtcctcaatcagctcaactgggccttctctgaattcattggcatgatccaagagatccagcaggctgctgagcgcctggagcggaactttgtggacagccggcagctcaaggtatgtgccacctgctttgacctctcggtcagcctgctgcgtgtcttggagatgactatcacactggtgcctgagatattccttgactggacccggcctacctctgagatgctgctgcggcgtcttgcacagctgctaaaccaggtgctgaaccgggtgacagctgagaggaacctgtttgatcgtgtggtcaccctacggctgcctggcctagagagcgtggaccactatcccattctggtggcagtgacgggcatcctggtgcagctcctggtgcgtggcccagcctcagagagagagcaagccacatcagtgctcctggcagatccctgcttccagctacgctcaatatgctatctcctgggacagccagagcccccagcacctggcactgctctgccagcccctgaccggaagcgcttctccctgcagagctatgcggattatatcagtgccgatgagctggcccaagtggaacagatgctggcgcacctgacctctgcatctgcccaggcagcagctgcctccctgcccaccagtgaggaggacctctgccccatctgctatgcccaccccatctctgctgtgttccagccctgtggccacaagtcctgcaaagcctgtatcaaccagcacctgatgaacaacaaggactgcttcttctgcaaaaccaccatcgtgtctgtagaggactgggagaagggagccaatacgagtactacctcctcagctgcctagccctcacagcctgtgccatcctggaacctccacctttgaacccagagccaggctgggccctatttatgagctccctttgcccttctcctgtatcccacaccaccacatccaacctccttgcctgcctgtatcctcattggtgggagcccagccatggccctaattgtgcctgagcttgactttcagtcagggccacagtgagcattaaattattattccatacaaaaaaaaaaaaaaaaaa

SEQ ID NO: 50 - protein, 1314 aa, Homo sapiens
MASKGAGMSFSRKSYRLTSDAEKSRVTGIVQEKLLNDYLNRIFSSSEHAPPAATSRKPLNFQNLPEHLDQLLQVDNEEEESQGQVEGRLGPSTVVLDHTGGFEGLLLVDDDLLGVIGHSNFGTIRSTTCVYKGKWLYEVLISSQGLMQIGWCTISCRFNQEEGVGDTHNSYAYDGNRVRKWNVTTTNYGKAWAAGDIVSCLIDLDDGTLSFCLNGVSLGTAFENLSRGLGMAYFPAISLSFKESVAFNFGSRPLRYPVAGYRPLQDPPSADLVRAQRLLGCFRAVLSVELDPVEGRLLDKESSKWRLRGQPTVLLTLAHIFHHFAPLLRKVYLVEAVLMSFLLGIVEKGTPTQAQSVVHQVLDLLWLFMEDYEVQDCLKQLMMSLLRLYRFSPIVPDLGLQIHYLRLTIAILRHEKSRKFLLSNVLFDVLRSVVFFYIKSPLRVEEAGLQELIPTTWWPHCSSREGKESTEMKEETAEERLRRRAYERGCQRLRKRIEVVEELQVQILKLLLDNKDDNGGEASRYIFLTKFRKFLQENASGRGNMPMLCPPEYMVCFLHRLISALRYYWDEYKASNPHASFSEEAYIPPQVFYNGKVDYFDLQRLGGLLSHLRKTLKDDLASKANIVIDPLELQSTAMDDLDEDEEPAPAMAQRPMQALAVGGPLPLPRPGWLSSPTLGRANRFLSTAAVSLMTPRRPLSTSEKVKVRTLSVEQRTREDIEGSHWNEGLLLGRPPEEPEQPLTENSLLEVLDGAVMMYNLSVHQQLGKMVGVSDDVNEYAMALRDTEDKLRRCPKRRKDILAELTKSQKVFSEKLDHLSRRLAWVHATVYSQEKMLDIYWLLRVCLRTIEHGDRTGSLFAFMPEFYLSVAINSYSALKNYFGPVHSMEELPGYEETLTRLAAILAKHFADARIVGTDIRDSLMQALASYVCYPHSLRAVERIPEEQRIAMVRNLLAPYEQRPWAQTNWILVRLWRGCGFGYRYTRLPHLLKTKLEDANLPSLQKPCPSTLLQQHMADLLQQGPDVAPSFLNSVLNQLNWAFSEFIGMIQEIQQAAERLERNFVDSRQLKVCATCFDLSVSLLRVLEMTITLVPEIFLDWTRPTSEMLLRRLAQLLNQVLNRVTAERNLFDRVVTLRLPGLESVDHYPILVAVTGILVQLLVRGPASEREQATSVLLADPCFQLRSICYLLGQPEPPAPGTALPAPDRKRFSLQSYADYISADELAQVEQMLAHLTSASAQAAAASLPTSEEDLCPICYAHPISAVFQPCGHKSCKACINQHLMNNKDCFFCKTTIVSVEDWEKGANTSTTSSAA

SEQ ID NO: 51 - DNA, 6891 bp, Homo sapiens
  CDS (165)..(3803)
ggtggcctctgtggccgtccaggctagcggcggcccgcaggcggcggggagaaagactctctcacctggtcttgcggctgtggccaccgccggccaggggtgtggagggcgtgctgccggagacgtccgccgggctctgcagttccgccgggggtcgggcagctatggagccgcggcccacggcgccctcctccggcgccccgggactggccggggtcggggagacgccgtcagccgctgcgctggccgcagccagggtggaactgcccggcacggctgtgccctcggtgccggaggatgctgcgcccgcgagccgggacggcggcggggtccgcgatgagggccccgcggcggccggggacgggctgggcagacccttggggcccaccccgagccagagccgtttccaggtggacctggtttccgagaacgccgggcgggccgctgctgcggcggcggcggcggcggcggcagcggcggcggctggtgctggggcgggggccaagcagacccccgcggacggggaagccagcggcgagagcgagccggctaaaggcagcgaggaagccaagggccgcttccgcgtgaacttcgtggacccagctgcctcctcgtcggctgaagacagcctgtcagatgctgccggggtcggagtcgacgggcccaacgtgagcttccagaacggcggggacacggtgctgagcgagggcagcagcctgcactccggcggcggcggcggcagtgggcaccaccagcactactattatgatacccacaccaacacctactacctgcgcaccttcggccacaacaccatggacgctgtgcccaggatcgatcactaccggcacacagccgcgcagctgggcgagaagctgctccggcctagcctggcggagctccacgacgagctggaaaaggaaccttttgaggatggctttgcaaatggggaagaaagtactccaaccagagatgctgtggtcacgtatactgcagaaagtaaaggagtcgtgaagtttggctggatcaagggtgtattagtacgttgtatgttaaacatttggggtgtgatgcttttcattagattgtcatggattgtgggtcaagctggaataggtctatcagtccttgtaataatgatggccactgttgtgacaactatcacaggattgtctacttcagcaatagcaactaatggatttgtaagaggaggaggagcatattatttaatatctagaagtctagggccagaatttggtggtgcaattggtctaatcttcgcctttgccaacgctgttgcagttgctatgtatgtggttggatttgcagaaaccgtggtggagttgcttaaggaacattccatacttatgatagatgaaatcaatgatatccgaattattggagccattacagtcgtgattcttttaggtatctcagtagctggaatggagtgggaagcaaaagctcagattgttcttttggtgatcctacttcttgctattggtgatttcgtcataggaacatttatcccactggagagcaagaagccaaaagggttttttggttataaatctgaaatatttaatgagaactttgggcccgattttcgagaggaagagactttcttttctgtatttgccatcttttttcctgctgcaactggtattctggctggagcaaatatctcaggtgatcttgcagatcctcagtcagccatacccaaaggaacactcctagccattttaattactacattggtttacgtaggaattgcagtatctgtaggttcttgtgttgttcgagatgccactggaaacgttaatgacactatcgtaacagagctaacaaactgtacttctgcagcctgcaaattaaactttgatttttcatcttgtgaaagcagtccttgttcctatggcctaatgaacaacttccaggtaatgagtatggtgtcaggatttacaccactaatttctgcaggtatattttcagccactctttcttcagcattagcatccctagtgagtgctcccaaaatatttcaggctctatgtaaggacaacatctacccagctttccagatgtttgctaaaggttatgggaaaaataatgaacctcttcgtggctacatcttaacattcttaattgcacttggattcatcttaattgctgaactgaatgttattgcaccaattatctcaaacttcttccttgcatcatatgcattgatcaatttttcagtattccatgcatcacttgcaaaatctccaggatggcgtcctgcattcaaatactacaacatgtggatatcacttcttggagcaattctttgttgcatagtaatgttcgtcattaactggtgggctgcattgctaacatatgtgatagtccttgggctgtatatttatgttacctacaaaaaaccagatgtgaattggggatcctctacacaagccctgacttacctgaatgcactgcagcattcaattcgtctttctggagtggaagaccacgtgaaaaactttaggccacagtgtcttgttatgacaggtgctccaaactcacgtccagctttacttcatcttgttcatgatttcacaaaaaatgttggtttgatgatctgtggccatgtacatatgggtcctcgaagacaagccatgaaagagatgtccatcgatcaagccaaatatcagcgatggcttattaagaacaaaatgaaggcattttatgctccagtacatgcagatgacttgagagaaggtgcacagtatttgatgcaggctgctggtcttggtcgtatgaagccaaacacacttgtccttggatttaagaaagattggttgcaagcagatatgagggatgtggatatgtatataaacttatttcatgatgcttttgacatacaatatggagtagtggttattcgcctaaaagaaggtctggatatatctcatcttcaaggacaagaagaattattgtcatcacaagagaaatctcctggcaccaaggatgtggtagtaagtgtggaatatagtaaaaagtccgatttagatacttccaaaccactcagtgaaaaaccaattacacacaaagttgaggaagaggatggcaagactgcaactcaaccactgttgaaaaaagaatccaaaggccctattgtgcctttaaatgtagctgaccaaaagcttcttgaagctagtacacagtttcagaaaaaacaaggaaagaatactattgatgtctggtggctttttgatgatggaggtttgaccttattgataccttaccttctgacgaccaagaaaaaatggaaagactgtaagatcagagtattcattggtggaaagataaacagaatagaccatgaccggagagcgatggctactttgcttagcaagttccggatagacttttctgatatcatggttctaggagatatcaataccaaaccaaagaaagaaaatattatagcttttgaggaaatcattgagccatacagacttcatgaagatgataaagagcaagatattgcagataaaatgaaagaagatgaaccatggcgaataacagataatgagcttgaactttataagaccaagacataccggcagatcaggttaaatgagttattaaaggaacattcaagcacagctaatattattgtcatgagtctcccagttgcacgaaaaggtgctgtgtctagtgctctctacatggcatggttagaagctctatctaaggacctaccaccaatcctcctagttcgtgggaatcatcagagtgtccttaccttctattcataaatgttctatacagtggacagccctccagaatggtacttcagtgcctagtgtagtaactgaaatcttcaatgacacattaacatcacaatggcgaatggtgacttttctttcacgatttcattaatttgaaagcacacaggaaagttgctccattgataacgtgtatggagacttcggttttagtcaattccatatctcaatcttaatggtgattcttctctgttgaactgaagtttgtgagagtagttttcctttgctacttgaatagcaataaaagcgtgttaactttttgattgatgaaagaagtacaaaaagcctttagccttgaggtgccttctgaaattaaccaaatttcatccatatatcctcttttataaacttatagaatgtcaaactttgccttcaactgtttttatttctagtctcttccactttaaaacaaaatgaacactgcttgtcttcttccattgaccatttagtgttgagtactgtatgtgttttgttaattctataaaggtatctgttagatattaaaggtgagaattagggcaggttaatcaaaaatggggaaggggaaatggtaaccaaaaagtaaccccatggtaaggtttatatgagtatatgtgaatatagagctaggaaaaaaagcccccccaaatacctttttaacccctctgattggctattattactatatttattattatttattgaaaccttagggaagattgaagattcatcccatacttctatataccatgcttaaaaatcacgtcattctttaaacaaaaatactcaagatcatttatatttatttggagagaaaactgtcctaatttagaatttccctcaaatctgagggacttttaagaaatgctaacagatttttctggaggaaatttagacaaaacaatgtcatttagtagaatatttcagtatttaagtggaatttcagtatactgtactatcctttataagtcattaaaataatgtttcatcaaatggttaaatggaccactggtttcttagagaaatgtttttaggcttaattcattcaattgtcaagtacacttagtcttaatacactcaggtttgaacagattattctgaatattaaaatttaatccattcttaatattttaaaacttttgttaagaaaaactgccagtttgtgcttttgaaatgtctgttttgacatcatagtctagtaaaattttgacagtgcatatgtactgttactaaaagctttatatgaaattattaatgtgaagtttttcatttataattcaaggaaggatttcctgaaaacatttcaagggatttatgtctacatatttgtgtgtgtgtgtgtatatatatgtaatatgcatacacagatgcatatgtgtatatataatgaaatttatgttgctggtattttgcattttaaagtgatcaagattcattaggcaaactttggtttaagtaaacatatgttcaaaatcagattaacagatacaggtttcatagagaacaaaggtgatcatttgaagggcatgctgtaatttcacacaattttccagttcaaaaatggagaatacttcgcctaaaatactgttaagtgggttaattgatacaagtttctgtggtggaaaatttatgcaggttttcacgaatccttttttttttttttttttttttttgagacggagtcttgctctgttgccacgctggaatgcagtaacgtgatcttggctcactgcgacctccacctccccagttcaagcgattctcctgcctcagcctccctagtagctgggactacgggtgcacgccaccatgcccagctaatttttgtattttgagtagagacagggtttcaccgtgttggctaggatggtgtctatctcttgaccttgtgatccacccgcctcagcctcccagagtgctgggattacaggtgcgagccactgcgcctggctggttttcatgaatcttgatagacatctataacgttattattttcagtggtgtgcagcatttttgcttcatgagtatgacctaggtatagagatctgataacttgaattcagaatattaagaaaatgaagtaactgattttctaaaaaaaaaaaaaaaaaaaatttctacattataactcacagcattgttccattgcaggttttgcaatgtttgggggtaaagacagtagaaatattattcagtaaacaataatgtgtgaacttttaagatggataatagggcatggactgagtgctgctatcttgaaatgtgcacaggtacacttaccttttttttttttttttttaagtttttcccattcaggaaaacaacattgtgatctgtactacaggaaccaaatgtcatgcgtcatacatgtgggtataaagtacataaaatatatctaactattcataatgtggggtgggtaatactgtctgtgaaataatgtaagaagcttttcacttaaaaaaaatgcattactttcacttaacactagacaccaggtcgaaaattttcaaggttatagtacttatttcaacaattcttagagatgctagctagtgttgaagctaaaaatagctttatttatgctgaattgtgatttttttatgccaaattttttttagttctaatcattgatgatagcttggaaataaataattatgccatggcatttgacagttcattattcctataagaattaaattgagtttagagagaatggtggtgttgagctgattattaacagttactgaaatcaaatatttatttgttacattattccatttgtattttaggtttccttttacattctttttatatgcattctgacattacatattttttaagactatggaaataatttaaagatttaagctctggtggatgattatctgctaagtaagtctgaaaatgtaatattttgataatactgtaatatacctgtcacacaaatgcttttctaatgttttaaccttgagtattgcagttgctgctttgtacagaggttactgcaataaaggaagtggattcattaaacctatttaatgtccaaaaaaaaaaaaaaaaaaaaaaaaaaaaaaaa

SEQ ID NO: 52 - protein, 1212 aa, Homo sapiens
MEPRPTAPSSGAPGLAGVGETPSAAALAAARVELPGTAVPSVPEDAAPASRDGGGVRDEGPAAAGDGLGRPLGPTPSQSRFQVDLVSENAGRAAAAAAAAAAAAAAAGAGAGAKQTPADGEASGESEPAKGSEEAKGRFRVNFVDPAASSSAEDSLSDAAGVGVDGPNVSFQNGGDTVLSEGSSLHSGGGGGSGHHQHYYYDTHTNTYYLRTFGHNTMDAVPRIDHYRHTAAQLGEKLLRPSLAELHDELEKEPFEDGFANGEESTPTRDAVVTYTAESKGVVKFGWIKGVLVRCMLNIWGVMLFIRLSWIVGQAGIGLSVLVIMMATVVTTITGLSTSAIATNGFVRGGGAYYLISRSLGPEFGGAIGLIFAFANAVAVAMYVVGFAETVVELLKEHSILMIDEINDIRIIGAITVVILLGISVAGMEWEAKAQIVLLVILLLAIGDFVIGTFIPLESKKPKGFFGYKSEIFNENFGPDFREEETFFSVFAIFFPAATGILAGANISGDLADPQSAIPKGTLLAILITTLVYVGIAVSVGSCVVRDATGNVNDTIVTELTNCTSAACKLNFDFSSCESSPCSYGLMNNFQVMSMVSGFTPLISAGIFSATLSSALASLVSAPKIFQALCKDNIYPAFQMFAKGYGKNNEPLRGYILTFLIALGFILIAELNVIAPIISNFFLASYALINFSVFHASLAKSPGWRPAFKYYNMWISLLGAILCCIVMFVINWWAALLTYVIVLGLYIYVTYKKPDVNWGSSTQALTYLNALQHSIRLSGVEDHVKNFRPQCLVMTGAPNSRPALLHLVHDFTKNVGLMICGHVHMGPRRQAMKEMSIDQAKYQRWLIKNKMKAFYAPVHADDLREGAQYLMQAAGLGRMKPNTLVLGFKKDWLQADMRDVDMYINLFHDAFDIQYGVVVIRLKEGLDISHLQGQEELLSSQEKSPGTKDVVVSVEYSKKSDLDTSKPLSEKPITHKVEEEDGKTATQPLLKKESKGPIVPLNVADQKLLEASTQFQKKQGKNTIDVWWLFDDGGLTLLIPYLLTTKKKWKDCKIRVFIGGKINRIDHDRRAMATLLSKFRIDFSDIMVLGDINTKPKKENIIAFEEIIEPYRLHEDDKEQDIADKMKEDEPWRITDNELELYKTKTYRQIRLNELLKEHSSTANIIVMSLPVARKGAVSSALYMAWLEALSKDLPPILLVRGNHQSVLTFYS

SEQ ID NO: 53 - DNA, 6843 bp, Homo sapiens
  CDS (165)..(3755)
ggtggcctctgtggccgtccaggctagcggcggcccgcaggcggcggggagaaagactctctcacctggtcttgcggctgtggccaccgccggccaggggtgtggagggcgtgctgccggagacgtccgccgggctctgcagttccgccgggggtcgggcagctatggagccgcggcccacggcgccctcctccggcgccccgggactggccggggtcggggagacgccgtcagccgctgcgctggccgcagccagggtggaactgcccggcacggctgtgccctcggtgccggaggatgctgcgcccgcgagccgggacggcggcggggtccgcgatgagggccccgcggcggccggggacgggctgggcagacccttggggcccaccccgagccagagccgtttccaggtggacctggtttccgagaacgccgggcgggccgctgctgcggcggcggcggcggcggcggcagcggcggcggctggtgctggggcgggggccaagcagacccccgcggacggggaagccagcggcgagagcgagccggctaaaggcagcgaggaagccaagggccgcttccgcgtgaacttcgtggacccagctgcctcctcgtcggctgaagacagcctgtcagatgctgccggggtcggagtcgacgggcccaacgtgagcttccagaacggcggggacacggtgctgagcgagggcagcagcctgcactccggcggcggcggcggcagtgggcaccaccagcactactattatgatacccacaccaacacctactacctgcgcaccttcggccacaacaccatggacgctgtgcccaggatcgatcactaccggcacacagccgcgcagctgggcgagaagctgctccggcctagcctggcggagctccacgacgagctggaaaaggaaccttttgaggatggctttgcaaatggggaagaaagtactccaaccagagatgctgtggtcacgtatactgcagaaagtaaaggagtcgtgaagtttggctggatcaagggtgtattagtacgttgtatgttaaacatttggggtgtgatgcttttcattagattgtcatggattgtgggtcaagctggaataggtctatcagtccttgtaataatgatggccactgttgtgacaactatcacaggattgtctacttcagcaatagcaactaatggatttgtaagaggaggaggagcatattatttaatatctagaagtctagggccagaatttggtggtgcaattggtctaatcttcgcctttgccaacgctgttgcagttgctatgtatgtggttggatttgcagaaaccgtggtggagttgcttaaggaacattccatacttatgatagatgaaatcaatgatatccgaattattggagccattacagtcgtgattcttttaggtatctcagtagctggaatggagtgggaagcaaaagctcagattgttcttttggtgatcctacttcttgctattggtgatttcgtcataggaacatttatcccactggagagcaagaagccaaaagggttttttggttataaatctgaaatatttaatgagaactttgggcccgattttcgagaggaagagactttcttttctgtatttgccatcttttttcctgctgcaactggtattctggctggagcaaatatctcaggtgatcttgcagatcctcagtcagccatacccaaaggaacactcctagccattttaattactacattggtttacgtaggaattgcagtatctgtaggttcttgtgttgttcgagatgccactggaaacgttaatgacactatcgtaacagagctaacaaactgtacttctgcagcctgcaaattaaactttgatttttcatcttgtgaaagcagtccttgttcctatggcctaatgaacaacttccaggtaatgagtatggtgtcaggatttacaccactaatttctgcaggtatattttcagccactctttcttcagcattagcatccctagtgagtgctcccaaaatatttcaggctctatgtaaggacaacatctacccagctttccagatgtttgctaaaggttatgggaaaaataatgaacctcttcgtggctacatcttaacattcttaattgcacttggattcatcttaattgctgaactgaatgttattgcaccaattatctcaaacttcttccttgcatcatatgcattgatcaatttttcagtattccatgcatcacttgcaaaatctccaggatggcgtcctgcattcaaatactacaacatgtggatatcacttcttggagcaattctttgttgcatagtaatgttcgtcattaactggtgggctgcattgctaacatatgtgatagtccttgggctgtatatttatgttacctacaaaaaaccagatgtgaattggggatcctctacacaagccctgacttacctgaatgcactgcagcattcaattcgtctttctggagtggaagaccacgtgaaaaactttaggccacagtgtcttgttatgacaggtgctccaaactcacgtccagctttacttcatcttgttcatgatttcacaaaaaatgttggtttgatgatctgtggccatgtacatatgggtcctcgaagacaagccatgaaagagatgtccatcgatcaagccaaatatcagcgatggcttattaagaacaaaatgaaggcattttatgctccagtacatgcagatgacttgagagaaggtgcacagtatttgatgcaggctgctggtcttggtcgtatgaagccaaacacacttgtccttggatttaagaaagattggttgcaagcagatatgagggatgtggatatgtatataaacttatttcatgatgcttttgacatacaatatggagtagtggttattcgcctaaaagaaggtctggatatatctcatcttcaaggacaagaagaattattgtcatcacaagagaaatctcctggcaccaaggatgtggtagtaagtgtggaatatagtaaaaagtccgatttagatacttccaaaccactcagtgaaaaaccaattacacacaaagaatccaaaggccctattgtgcctttaaatgtagctgaccaaaagcttcttgaagctagtacacagtttcagaaaaaacaaggaaagaatactattgatgtctggtggctttttgatgatggaggtttgaccttattgataccttaccttctgacgaccaagaaaaaatggaaagactgtaagatcagagtattcattggtggaaagataaacagaatagaccatgaccggagagcgatggctactttgcttagcaagttccggatagacttttctgatatcatggttctaggagatatcaataccaaaccaaagaaagaaaatattatagcttttgaggaaatcattgagccatacagacttcatgaagatgataaagagcaagatattgcagataaaatgaaagaagatgaaccatggcgaataacagataatgagcttgaactttataagaccaagacataccggcagatcaggttaaatgagttattaaaggaacattcaagcacagctaatattattgtcatgagtctcccagttgcacgaaaaggtgctgtgtctagtgctctctacatggcatggttagaagctctatctaaggacctaccaccaatcctcctagttcgtgggaatcatcagagtgtccttaccttctattcataaatgttctatacagtggacagccctccagaatggtacttcagtgcctagtgtagtaactgaaatcttcaatgacacattaacatcacaatggcgaatggtgacttttctttcacgatttcattaatttgaaagcacacaggaaagttgctccattgataacgtgtatggagacttcggttttagtcaattccatatctcaatcttaatggtgattcttctctgttgaactgaagtttgtgagagtagttttcctttgctacttgaatagcaataaaagcgtgttaactttttgattgatgaaagaagtacaaaaagcctttagccttgaggtgccttctgaaattaaccaaatttcatccatatatcctcttttataaacttatagaatgtcaaactttgccttcaactgtttttatttctagtctcttccactttaaaacaaaatgaacactgcttgtcttcttccattgaccatttagtgttgagtactgtatgtgttttgttaattctataaaggtatctgttagatattaaaggtgagaattagggcaggttaatcaaaaatggggaaggggaaatggtaaccaaaaagtaaccccatggtaaggtttatatgagtatatgtgaatatagagctaggaaaaaaagcccccccaaatacctttttaacccctctgattggctattattactatatttattattatttattgaaaccttagggaagattgaagattcatcccatacttctatataccatgcttaaaaatcacgtcattctttaaacaaaaatactcaagatcatttatatttatttggagagaaaactgtcctaatttagaatttccctcaaatctgagggacttttaagaaatgctaacagatttttctggaggaaatttagacaaaacaatgtcatttagtagaatatttcagtatttaagtggaatttcagtatactgtactatcctttataagtcattaaaataatgtttcatcaaatggttaaatggaccactggtttcttagagaaatgtttttaggcttaattcattcaattgtcaagtacacttagtcttaatacactcaggtttgaacagattattctgaatattaaaatttaatccattcttaatattttaaaacttttgttaagaaaaactgccagtttgtgcttttgaaatgtctgttttgacatcatagtctagtaaaattttgacagtgcatatgtactgttactaaaagctttatatgaaattattaatgtgaagtttttcatttataattcaaggaaggatttcctgaaaacatttcaagggatttatgtctacatatttgtgtgtgtgtgtgtatatatatgtaatatgcatacacagatgcatatgtgtatatataatgaaatttatgttgctggtattttgcattttaaagtgatcaagattcattaggcaaactttggtttaagtaaacatatgttcaaaatcagattaacagatacaggtttcatagagaacaaaggtgatcatttgaagggcatgctgtaatttcacacaattttccagttcaaaaatggagaatacttcgcctaaaatactgttaagtgggttaattgatacaagtttctgtggtggaaaatttatgcaggttttcacgaatccttttttttttttttttttttttttgagacggagtcttgctctgttgccacgctggaatgcagtaacgtgatcttggctcactgcgacctccacctccccagttcaagcgattctcctgcctcagcctccctagtagctgggactacgggtgcacgccaccatgcccagctaatttttgtattttgagtagagacagggtttcaccgtgttggctaggatggtgtctatctcttgaccttgtgatccacccgcctcagcctcccagagtgctgggattacaggtgcgagccactgcgcctggctggttttcatgaatcttgatagacatctataacgttattattttcagtggtgtgcagcatttttgcttcatgagtatgacctaggtatagagatctgataacttgaattcagaatattaagaaaatgaagtaactgattttctaaaaaaaaaaaaaaaaaaaatttctacattataactcacagcattgttccattgcaggttttgcaatgtttgggggtaaagacagtagaaatattattcagtaaacaataatgtgtgaacttttaagatggataatagggcatggactgagtgctgctatcttgaaatgtgcacaggtacacttaccttttttttttttttttttaagtttttcccattcaggaaaacaacattgtgatctgtactacaggaaccaaatgtcatgcgtcatacatgtgggtataaagtacataaaatatatctaactattcataatgtggggtgggtaatactgtctgtgaaataatgtaagaagcttttcacttaaaaaaaatgcattactttcacttaacactagacaccaggtcgaaaattttcaaggttatagtacttatttcaacaattcttagagatgctagctagtgttgaagctaaaaatagctttatttatgctgaattgtgatttttttatgccaaattttttttagttctaatcattgatgatagcttggaaataaataattatgccatggcatttgacagttcattattcctataagaattaaattgagtttagagagaatggtggtgttgagctgattattaacagttactgaaatcaaatatttatttgttacattattccatttgtattttaggtttccttttacattctttttatatgcattctgacattacatattttttaagactatggaaataatttaaagatttaagctctggtggatgattatctgctaagtaagtctgaaaatgtaatattttgataatactgtaatatacctgtcacacaaatgcttttctaatgttttaaccttgagtattgcagttgctgctttgtacagaggttactgcaataaaggaagtggattcattaaacctatttaatgtccaaaaaaaaaaaaaaaaaaaaaaaaaaaaaaaa

SEQ ID NO: 54 - protein, 1196 aa, Homo sapiens
MEPRPTAPSSGAPGLAGVGETPSAAALAAARVELPGTAVPSVPEDAAPASRDGGGVRDEGPAAAGDGLGRPLGPTPSQSRFQVDLVSENAGRAAAAAAAAAAAAAAAGAGAGAKQTPADGEASGESEPAKGSEEAKGRFRVNFVDPAASSSAEDSLSDAAGVGVDGPNVSFQNGGDTVLSEGSSLHSGGGGGSGHHQHYYYDTHTNTYYLRTFGHNTMDAVPRIDHYRHTAAQLGEKLLRPSLAELHDELEKEPFEDGFANGEESTPTRDAVVTYTAESKGVVKFGWIKGVLVRCMLNIWGVMLFIRLSWIVGQAGIGLSVLVIMMATVVTTITGLSTSAIATNGFVRGGGAYYLISRSLGPEFGGAIGLIFAFANAVAVAMYVVGFAETVVELLKEHSILMIDEINDIRIIGAITVVILLGISVAGMEWEAKAQIVLLVILLLAIGDFVIGTFIPLESKKPKGFFGYKSEIFNENFGPDFREEETFFSVFAIFFPAATGILAGANISGDLADPQSAIPKGTLLAILITTLVYVGIAVSVGSCVVRDATGNVNDTIVTELTNCTSAACKLNFDFSSCESSPCSYGLMNNFQVMSMVSGFTPLISAGIFSATLSSALASLVSAPKIFQALCKDNIYPAFQMFAKGYGKNNEPLRGYILTFLIALGFILIAELNVIAPIISNFFLASYALINFSVFHASLAKSPGWRPAFKYYNMWISLLGAILCCIVMFVINWWAALLTYVIVLGLYIYVTYKKPDVNWGSSTQALTYLNALQHSIRLSGVEDHVKNFRPQCLVMTGAPNSRPALLHLVHDFTKNVGLMICGHVHMGPRRQAMKEMSIDQAKYQRWLIKNKMKAFYAPVHADDLREGAQYLMQAAGLGRMKPNTLVLGFKKDWLQADMRDVDMYINLFHDAFDIQYGVVVIRLKEGLDISHLQGQEELLSSQEKSPGTKDVVVSVEYSKKSDLDTSKPLSEKPITHKESKGPIVPLNVADQKLLEASTQFQKKQGKNTIDVWWLFDDGGLTLLIPYLLTTKKKWKDCKIRVFIGGKINRIDHDRRAMATLLSKFRIDFSDIMVLGDINTKPKKENIIAFEEIIEPYRLHEDDKEQDIADKMKEDEPWRITDNELELYKTKTYRQIRLNELLKEHSSTANIIVMSLPVARKGAVSSALYMAWLEALSKDLPPILLVRGNHQSVLTFYS

SEQ ID NO: 55 - DNA, 3939 bp, Homo sapiens
  CDS (231)..(2783)
atcctcctccaggtcctggcgcacagggtgggagcgctgcgctgcgccgcgctgcgcatcgcggcccgcttgccgcctgccccctgccctagctgggccacctccccgggctgccggtggagggctaagaggcgctaacgttacgctgtttccggttttccagcgggctctgtttcccctcccaaggcggcggcggctgagcggcggagccccccaaatggcctggccagatgcggcaggtttgctgctcagcgctgccgccgccgccactggagaagggtcggtgcagcagctacagcgacagcagcagcagcagcagcgagaggagcagcagcagcagcagcagcagcagcgagagcggcagcagcagcaggagcagcagcaacaacagcagcatctctcgtcccgctgcgcccccagagccgcggccgcagcaacagccgcagccccgcagccccgcagcccggagagccgccgcccgttcgcgagccgcagccgccggcggcatgaggcgcgacccggcccccggcttctccatgctgctcttcggtgtgtcgctcgcctgctactcgcccagcctcaagtcagtgcaggaccaggcgtacaaggcacccgtggtggtggagggcaaggtacaggggctggtcccagccggcggctccagctccaacagcacccgagagccgcccgcctcgggtcgggtggcgttggtaaaggtgctggacaagtggccgctccggagcggggggctgcagcgcgagcaggtgatcagcgtgggctcctgtgtgccgctcgaaaggaaccagcgctacatctttttcctggagcccacggaacagcccttagtctttaagacggcctttgcccccctcgataccaacggcaaaaatctcaagaaagaggtgggcaagatcctgtgcactgactgcgccacccggcccaagttgaagaagatgaagagccagacgggacaggtgggtgagaagcaatcgctgaagtgtgaggcagcagccggtaatccccagccttcctaccgttggttcaaggatggcaaggagctcaaccgcagccgagacattcgcatcaaatatggcaacggcagaaagaactcacgactacagttcaacaaggtgaaggtggaggacgctggggagtatgtctgcgaggccgagaacatcctggggaaggacaccgtccggggccggctttacgtcaacagcgtgagcaccaccctgtcatcctggtcggggcacgcccggaagtgcaacgagacagccaagtcctattgcgtcaatggaggcgtctgctactacatcgagggcatcaaccagctctcctgcaaatgtccaaatggattcttcggacagagatgtttggagaaactgcctttgcgattgtacatgccagatcctaagcaaaaagccgaggagctgtaccagaagagggtcctgaccatcacgggcatctgcgtggctctgctggtcgtgggcatcgtctgtgtggtggcctactgcaagaccaaaaaacagcggaagcagatgcacaaccacctccggcagaacatgtgcccggcccatcagaaccggagcttggccaatgggcccagccacccccggctggacccagaggagatccagatggcagattatatttccaagaacgtgccagccacagaccatgtcatcaggagagaaactgagaccaccttctctgggagccactcctgttctccttctcaccactgctccacagccacacccacctccagccacagacacgagagccacacgtggagcctggaacgttctgagagcctgacttctgactcccagtcggggatcatgctatcatcagtgggtaccagcaaatgcaacagcccagcatgtgtggaggcccgggcaaggcgggcagcagcctacaacctggaggagcggcgcagggccaccgcgccaccctatcacgattccgtggactcccttcgcgactccccacacagcgagaggtacgtgtcggccctgaccacgcccgcgcgcctctcgcccgtggacttccactactcgctggccacgcaggtgccaactttcgagatcacgtcccccaactcggcgcacgccgtgtcgctgccgccggcggcgcccatcagttaccgcctggccgagcagcagccgttactgcggcacccggcgccccccggcccgggacccggacccgggcccgggcccgggcccggcgcagacatgcagcgcagctatgacagctactattaccccgcggcggggcccggaccgcggcgcgggacctgcgcgctcggcggcagcctgggcagcctgcctgccagccccttccgcatccccgaggacgacgagtacgagaccacgcaggagtgcgcgcccccgccgccgccgcggccgcgcgcgcgcggtgcgtcccgcaggacgtcggcggggccccggcgctggcgccgctcgcgcctcaacgggctggcggcgcagcgcgcacgggcggcgagggactcgctgtcgctgagcagcggctcgggcggcggctcagcctcggcgtcggacgacgacgcggacgacgcggacggggcgctggcggccgagagcacacctttcctgggcctgcgtggggcgcacgacgcgctgcgctcggactcgccgccactgtgcccggcggccgacagcaggacttactactcactggacagccacagcacgcgggccagcagcagacacagccgcgggccgcccccgcgggccaagcaggactcggcgccactctagggccccgccgcgcgcccctccgccccgcccgccccactatctttaaggagaccagagaccgcctactggagagaaaggaggaaaaaagaaataaaaatatttttattttctataaaaggaaaaaagtataacaaaatgttttattttcattttagcaaaaattgtcttataatactagctaacggcaaaggcgtttttatagggaaactatttatatgtaacatcctgatttacagcttcggaaaaaaaaaagaaacaacaaaaaaaaaagagagatgggccaattttttgactctttaatagaaacctattttgtggtgccttttgctgtatgctcatctggggctccgggggacaggtctgggttgtggggtgctgagagtgacagctgggagagaagaggtgcgggttctgttgggggcgagggtggggggcggtggggggttggccctaaggaagaactgaggacggaagtagctttgctcccaggcaagagctgaagttcccgacccctgggaggagagggccaggaccctaggcttggagctggagctggggtaacttccagggggagataaagacacagctacccgaatggggaagccctggctactcacagctgttaaaggagggggggcagagaaacgtttccccaagagcctgagcccagggaggtggcagctctgccaggggcccaatgttggcggctcctgtcccccacagcctccaggacgcccctccgtcctctgcagcaccttcgtttacaggtcgtcttttctattttacacctgcatgtcctttgcatttcagattctttagattggatgcatggtcacgctgggaccgagaagagccactcgacagtgtattccccttttagcaataaagtaacaccatttccttctcacaggctgcctcctagcccccaacccacctatgacatccactcgtctccagtcctgccctcccacccccaaaaactgggtccactgctaatttgtcaaaaaggtaattgtttaaaaaaaaaaaaaatcccaaacagaaacagatgggaatcctgtcctgaaatgtctgaacacctgactgttgacacttgaacatttttatattataaataaaatcagaaataactcctgttaaaaaaaaaaaaaaaaaa

SEQ ID NO: 56 - protein, 850 aa, Homo sapiens
MRQVCCSALPPPPLEKGRCSSYSDSSSSSSERSSSSSSSSSESGSSSRSSSNNSSISRPAAPPEPRPQQQPQPRSPAARRAAARSRAAAAGGMRRDPAPGFSMLLFGVSLACYSPSLKSVQDQAYKAPVVVEGKVQGLVPAGGSSSNSTREPPASGRVALVKVLDKWPLRSGGLQREQVISVGSCVPLERNQRYIFFLEPTEQPLVFKTAFAPLDTNGKNLKKEVGKILCTDCATRPKLKKMKSQTGQVGEKQSLKCEAAAGNPQPSYRWFKDGKELNRSRDIRIKYGNGRKNSRLQFNKVKVEDAGEYVCEAENILGKDTVRGRLYVNSVSTTLSSWSGHARKCNETAKSYCVNGGVCYYIEGINQLSCKCPNGFFGQRCLEKLPLRLYMPDPKQKAEELYQKRVLTITGICVALLVVGIVCVVAYCKTKKQRKQMHNHLRQNMCPAHQNRSLANGPSHPRLDPEEIQMADYISKNVPATDHVIRRETETTFSGSHSCSPSHHCSTATPTSSHRHESHTWSLERSESLTSDSQSGIMLSSVGTSKCNSPACVEARARRAAAYNLEERRRATAPPYHDSVDSLRDSPHSERYVSALTTPARLSPVDFHYSLATQVPTFEITSPNSAHAVSLPPAAPISYRLAEQQPLLRHPAPPGPGPGPGPGPGPGADMQRSYDSYYYPAAGPGPRRGTCALGGSLGSLPASPFRIPEDDEYETTQECAPPPPPRPRARGASRRTSAGPRRWRRSRLNGLAAQRARAARDSLSLSSGSGGGSASASDDDADDADGALAAESTPFLGLRGAHDALRSDSPPLCPAADSRTYYSLDSHSTRASSRHSRGPPPRAKQDSAPL

SEQ ID NO: 57 - DNA, 3921 bp, Homo sapiens
  CDS (231)..(2765)
atcctcctccaggtcctggcgcacagggtgggagcgctgcgctgcgccgcgctgcgcatcgcggcccgcttgccgcctgccccctgccctagctgggccacctccccgggctgccggtggagggctaagaggcgctaacgttacgctgtttccggttttccagcgggctctgtttcccctcccaaggcggcggcggctgagcggcggagccccccaaatggcctggccagatgcggcaggtttgctgctcagcgctgccgccgccgccactggagaagggtcggtgcagcagctacagcgacagcagcagcagcagcagcgagaggagcagcagcagcagcagcagcagcagcgagagcggcagcagcagcaggagcagcagcaacaacagcagcatctctcgtcccgctgcgcccccagagccgcggccgcagcaacagccgcagccccgcagccccgcagcccggagagccgccgcccgttcgcgagccgcagccgccggcggcatgaggcgcgacccggcccccggcttctccatgctgctcttcggtgtgtcgctcgcctgctactcgcccagcctcaagtcagtgcaggaccaggcgtacaaggcacccgtggtggtggagggcaaggtacaggggctggtcccagccggcggctccagctccaacagcacccgagagccgcccgcctcgggtcgggtggcgttggtaaaggtgctggacaagtggccgctccggagcggggggctgcagcgcgagcaggtgatcagcgtgggctcctgtgtgccgctcgaaaggaaccagcgctacatctttttcctggagcccacggaacagcccttagtctttaagacggcctttgcccccctcgataccaacggcaaaaatctcaagaaagaggtgggcaagatcctgtgcactgactgcgccacccggcccaagttgaagaagatgaagagccagacgggacaggtgggtgagaagcaatcgctgaagtgtgaggcagcagccggtaatccccagccttcctaccgttggttcaaggatggcaaggagctcaaccgcagccgagacattcgcatcaaatatggcaacggcagaaagaactcacgactacagttcaacaaggtgaaggtggaggacgctggggagtatgtctgcgaggccgagaacatcctggggaaggacaccgtccggggccggctttacgtcaacagcgtgagcaccaccctgtcatcctggtcggggcacgcccggaagtgcaacgagacagccaagtcctattgcgtcaatggaggcgtctgctactacatcgagggcatcaaccagctctcctgcaagtgtcctgtgggatacaccggggacaggtgtcagcagttcgcaatggtcaacttctccaaagccgaggagctgtaccagaagagggtcctgaccatcacgggcatctgcgtggctctgctggtcgtgggcatcgtctgtgtggtggcctactgcaagaccaaaaaacagcggaagcagatgcacaaccacctccggcagaacatgtgcccggcccatcagaaccggagcttggccaatgggcccagccacccccggctggacccagaggagatccagatggcagattatatttccaagaacgtgccagccacagaccatgtcatcaggagagaaactgagaccaccttctctgggagccactcctgttctccttctcaccactgctccacagccacacccacctccagccacagacacgagagccacacgtggagcctggaacgttctgagagcctgacttctgactcccagtcggggatcatgctatcatcagtgggtaccagcaaatgcaacagcccagcatgtgtggaggcccgggcaaggcgggcagcagcctacaacctggaggagcggcgcagggccaccgcgccaccctatcacgattccgtggactcccttcgcgactccccacacagcgagaggtacgtgtcggccctgaccacgcccgcgcgcctctcgcccgtggacttccactactcgctggccacgcaggtgccaactttcgagatcacgtcccccaactcggcgcacgccgtgtcgctgccgccggcggcgcccatcagttaccgcctggccgagcagcagccgttactgcggcacccggcgccccccggcccgggacccggacccgggcccgggcccgggcccggcgcagacatgcagcgcagctatgacagctactattaccccgcggcggggcccggaccgcggcgcgggacctgcgcgctcggcggcagcctgggcagcctgcctgccagccccttccgcatccccgaggacgacgagtacgagaccacgcaggagtgcgcgcccccgccgccgccgcggccgcgcgcgcgcggtgcgtcccgcaggacgtcggcggggccccggcgctggcgccgctcgcgcctcaacgggctggcggcgcagcgcgcacgggcggcgagggactcgctgtcgctgagcagcggctcgggcggcggctcagcctcggcgtcggacgacgacgcggacgacgcggacggggcgctggcggccgagagcacacctttcctgggcctgcgtggggcgcacgacgcgctgcgctcggactcgccgccactgtgcccggcggccgacagcaggacttactactcactggacagccacagcacgcgggccagcagcagacacagccgcgggccgcccccgcgggccaagcaggactcggcgccactctagggccccgccgcgcgcccctccgccccgcccgccccactatctttaaggagaccagagaccgcctactggagagaaaggaggaaaaaagaaataaaaatatttttattttctataaaaggaaaaaagtataacaaaatgttttattttcattttagcaaaaattgtcttataatactagctaacggcaaaggcgtttttatagggaaactatttatatgtaacatcctgatttacagcttcggaaaaaaaaaagaaacaacaaaaaaaaaagagagatgggccaattttttgactctttaatagaaacctattttgtggtgccttttgctgtatgctcatctggggctccgggggacaggtctgggttgtggggtgctgagagtgacagctgggagagaagaggtgcgggttctgttgggggcgagggtggggggcggtggggggttggccctaaggaagaactgaggacggaagtagctttgctcccaggcaagagctgaagttcccgacccctgggaggagagggccaggaccctaggcttggagctggagctggggtaacttccagggggagataaagacacagctacccgaatggggaagccctggctactcacagctgttaaaggagggggggcagagaaacgtttccccaagagcctgagcccagggaggtggcagctctgccaggggcccaatgttggcggctcctgtcccccacagcctccaggacgcccctccgtcctctgcagcaccttcgtttacaggtcgtcttttctattttacacctgcatgtcctttgcatttcagattctttagattggatgcatggtcacgctgggaccgagaagagccactcgacagtgtattccccttttagcaataaagtaacaccatttccttctcacaggctgcctcctagcccccaacccacctatgacatccactcgtctccagtcctgccctcccacccccaaaaactgggtccactgctaatttgtcaaaaaggtaattgtttaaaaaaaaaaaaaatcccaaacagaaacagatgggaatcctgtcctgaaatgtctgaacacctgactgttgacacttgaacatttttatattataaataaaatcagaaataactcctgttaaaaaaaaaaaaaaaaaa

SEQ ID NO: 58 - protein, 844 aa, Homo sapiens
MRQVCCSALPPPPLEKGRCSSYSDSSSSSSERSSSSSSSSSESGSSSRSSSNNSSISRPAAPPEPRPQQQPQPRSPAARRAAARSRAAAAGGMRRDPAPGFSMLLFGVSLACYSPSLKSVQDQAYKAPVVVEGKVQGLVPAGGSSSNSTREPPASGRVALVKVLDKWPLRSGGLQREQVISVGSCVPLERNQRYIFFLEPTEQPLVFKTAFAPLDTNGKNLKKEVGKILCTDCATRPKLKKMKSQTGQVGEKQSLKCEAAAGNPQPSYRWFKDGKELNRSRDIRIKYGNGRKNSRLQFNKVKVEDAGEYVCEAENILGKDTVRGRLYVNSVSTTLSSWSGHARKCNETAKSYCVNGGVCYYIEGINQLSCKCPVGYTGDRCQQFAMVNFSKAEELYQKRVLTITGICVALLVVGIVCVVAYCKTKKQRKQMHNHLRQNMCPAHQNRSLANGPSHPRLDPEEIQMADYISKNVPATDHVIRRETETTFSGSHSCSPSHHCSTATPTSSHRHESHTWSLERSESLTSDSQSGIMLSSVGTSKCNSPACVEARARRAAAYNLEERRRATAPPYHDSVDSLRDSPHSERYVSALTTPARLSPVDFHYSLATQVPTFEITSPNSAHAVSLPPAAPISYRLAEQQPLLRHPAPPGPGPGPGPGPGPGADMQRSYDSYYYPAAGPGPRRGTCALGGSLGSLPASPFRIPEDDEYETTQECAPPPPPRPRARGASRRTSAGPRRWRRSRLNGLAAQRARAARDSLSLSSGSGGGSASASDDDADDADGALAAESTPFLGLRGAHDALRSDSPPLCPAADSRTYYSLDSHSTRASSRHSRGPPPRAKQDSAPL

SEQ ID NO: 59 - DNA, 3963 bp, Homo sapiens
  CDS (231)..(2807)
atcctcctccaggtcctggcgcacagggtgggagcgctgcgctgcgccgcgctgcgcatcgcggcccgcttgccgcctgccccctgccctagctgggccacctccccgggctgccggtggagggctaagaggcgctaacgttacgctgtttccggttttccagcgggctctgtttcccctcccaaggcggcggcggctgagcggcggagccccccaaatggcctggccagatgcggcaggtttgctgctcagcgctgccgccgccgccactggagaagggtcggtgcagcagctacagcgacagcagcagcagcagcagcgagaggagcagcagcagcagcagcagcagcagcgagagcggcagcagcagcaggagcagcagcaacaacagcagcatctctcgtcccgctgcgcccccagagccgcggccgcagcaacagccgcagccccgcagccccgcagcccggagagccgccgcccgttcgcgagccgcagccgccggcggcatgaggcgcgacccggcccccggcttctccatgctgctcttcggtgtgtcgctcgcctgctactcgcccagcctcaagtcagtgcaggaccaggcgtacaaggcacccgtggtggtggagggcaaggtacaggggctggtcccagccggcggctccagctccaacagcacccgagagccgcccgcctcgggtcgggtggcgttggtaaaggtgctggacaagtggccgctccggagcggggggctgcagcgcgagcaggtgatcagcgtgggctcctgtgtgccgctcgaaaggaaccagcgctacatctttttcctggagcccacggaacagcccttagtctttaagacggcctttgcccccctcgataccaacggcaaaaatctcaagaaagaggtgggcaagatcctgtgcactgactgcgccacccggcccaagttgaagaagatgaagagccagacgggacaggtgggtgagaagcaatcgctgaagtgtgaggcagcagccggtaatccccagccttcctaccgttggttcaaggatggcaaggagctcaaccgcagccgagacattcgcatcaaatatggcaacggcagaaagaactcacgactacagttcaacaaggtgaaggtggaggacgctggggagtatgtctgcgaggccgagaacatcctggggaaggacaccgtccggggccggctttacgtcaacagcgtgagcaccaccctgtcatcctggtcggggcacgcccggaagtgcaacgagacagccaagtcctattgcgtcaatggaggcgtctgctactacatcgagggcatcaaccagctctcctgcaaatgtccaaatggattcttcggacagagatgtttggagaaactgcctttgcgattgtacatgccagatcctaagcaaaagcaccttggatttgaattaaaggaagccgaggagctgtaccagaagagggtcctgaccatcacgggcatctgcgtggctctgctggtcgtgggcatcgtctgtgtggtggcctactgcaagaccaaaaaacagcggaagcagatgcacaaccacctccggcagaacatgtgcccggcccatcagaaccggagcttggccaatgggcccagccacccccggctggacccagaggagatccagatggcagattatatttccaagaacgtgccagccacagaccatgtcatcaggagagaaactgagaccaccttctctgggagccactcctgttctccttctcaccactgctccacagccacacccacctccagccacagacacgagagccacacgtggagcctggaacgttctgagagcctgacttctgactcccagtcggggatcatgctatcatcagtgggtaccagcaaatgcaacagcccagcatgtgtggaggcccgggcaaggcgggcagcagcctacaacctggaggagcggcgcagggccaccgcgccaccctatcacgattccgtggactcccttcgcgactccccacacagcgagaggtacgtgtcggccctgaccacgcccgcgcgcctctcgcccgtggacttccactactcgctggccacgcaggtgccaactttcgagatcacgtcccccaactcggcgcacgccgtgtcgctgccgccggcggcgcccatcagttaccgcctggccgagcagcagccgttactgcggcacccggcgccccccggcccgggacccggacccgggcccgggcccgggcccggcgcagacatgcagcgcagctatgacagctactattaccccgcggcggggcccggaccgcggcgcgggacctgcgcgctcggcggcagcctgggcagcctgcctgccagccccttccgcatccccgaggacgacgagtacgagaccacgcaggagtgcgcgcccccgccgccgccgcggccgcgcgcgcgcggtgcgtcccgcaggacgtcggcggggccccggcgctggcgccgctcgcgcctcaacgggctggcggcgcagcgcgcacgggcggcgagggactcgctgtcgctgagcagcggctcgggcggcggctcagcctcggcgtcggacgacgacgcggacgacgcggacggggcgctggcggccgagagcacacctttcctgggcctgcgtggggcgcacgacgcgctgcgctcggactcgccgccactgtgcccggcggccgacagcaggacttactactcactggacagccacagcacgcgggccagcagcagacacagccgcgggccgcccccgcgggccaagcaggactcggcgccactctagggccccgccgcgcgcccctccgccccgcccgccccactatctttaaggagaccagagaccgcctactggagagaaaggaggaaaaaagaaataaaaatatttttattttctataaaaggaaaaaagtataacaaaatgttttattttcattttagcaaaaattgtcttataatactagctaacggcaaaggcgtttttatagggaaactatttatatgtaacatcctgatttacagcttcggaaaaaaaaaagaaacaacaaaaaaaaaagagagatgggccaattttttgactctttaatagaaacctattttgtggtgccttttgctgtatgctcatctggggctccgggggacaggtctgggttgtggggtgctgagagtgacagctgggagagaagaggtgcgggttctgttgggggcgagggtggggggcggtggggggttggccctaaggaagaactgaggacggaagtagctttgctcccaggcaagagctgaagttcccgacccctgggaggagagggccaggaccctaggcttggagctggagctggggtaacttccagggggagataaagacacagctacccgaatggggaagccctggctactcacagctgttaaaggagggggggcagagaaacgtttccccaagagcctgagcccagggaggtggcagctctgccaggggcccaatgttggcggctcctgtcccccacagcctccaggacgcccctccgtcctctgcagcaccttcgtttacaggtcgtcttttctattttacacctgcatgtcctttgcatttcagattctttagattggatgcatggtcacgctgggaccgagaagagccactcgacagtgtattccccttttagcaataaagtaacaccatttccttctcacaggctgcctcctagcccccaacccacctatgacatccactcgtctccagtcctgccctcccacccccaaaaactgggtccactgctaatttgtcaaaaaggtaattgtttaaaaaaaaaaaaaatcccaaacagaaacagatgggaatcctgtcctgaaatgtctgaacacctgactgttgacacttgaacatttttatattataaataaaatcagaaataactcctgttaaaaaaaaaaaaaaaaaa

SEQ ID NO: 60 - protein, 858 aa, Homo sapiens
MRQVCCSALPPPPLEKGRCSSYSDSSSSSSERSSSSSSSSSESGSSSRSSSNNSSISRPAAPPEPRPQQQPQPRSPAARRAAARSRAAAAGGMRRDPAPGFSMLLFGVSLACYSPSLKSVQDQAYKAPVVVEGKVQGLVPAGGSSSNSTREPPASGRVALVKVLDKWPLRSGGLQREQVISVGSCVPLERNQRYIFFLEPTEQPLVFKTAFAPLDTNGKNLKKEVGKILCTDCATRPKLKKMKSQTGQVGEKQSLKCEAAAGNPQPSYRWFKDGKELNRSRDIRIKYGNGRKNSRLQFNKVKVEDAGEYVCEAENILGKDTVRGRLYVNSVSTTLSSWSGHARKCNETAKSYCVNGGVCYYIEGINQLSCKCPNGFFGQRCLEKLPLRLYMPDPKQKHLGFELKEAEELYQKRVLTITGICVALLVVGIVCVVAYCKTKKQRKQMHNHLRQNMCPAHQNRSLANGPSHPRLDPEEIQMADYISKNVPATDHVIRRETETTFSGSHSCSPSHHCSTATPTSSHRHESHTWSLERSESLTSDSQSGIMLSSVGTSKCNSPACVEARARRAAAYNLEERRRATAPPYHDSVDSLRDSPHSERYVSALTTPARLSPVDFHYSLATQVPTFEITSPNSAHAVSLPPAAPISYRLAEQQPLLRHPAPPGPGPGPGPGPGPGADMQRSYDSYYYPAAGPGPRRGTCALGGSLGSLPASPFRIPEDDEYETTQECAPPPPPRPRARGASRRTSAGPRRWRRSRLNGLAAQRARAARDSLSLSSGSGGGSASASDDDADDADGALAAESTPFLGLRGAHDALRSDSPPLCPAADSRTYYSLDSHSTRASSRHSRGPPPRAKQDSAPL

SEQ ID NO: 61 - DNA, 3945 bp, Homo sapiens
  CDS (231)..(2789)
atcctcctccaggtcctggcgcacagggtgggagcgctgcgctgcgccgcgctgcgcatcgcggcccgcttgccgcctgccccctgccctagctgggccacctccccgggctgccggtggagggctaagaggcgctaacgttacgctgtttccggttttccagcgggctctgtttcccctcccaaggcggcggcggctgagcggcggagccccccaaatggcctggccagatgcggcaggtttgctgctcagcgctgccgccgccgccactggagaagggtcggtgcagcagctacagcgacagcagcagcagcagcagcgagaggagcagcagcagcagcagcagcagcagcgagagcggcagcagcagcaggagcagcagcaacaacagcagcatctctcgtcccgctgcgcccccagagccgcggccgcagcaacagccgcagccccgcagccccgcagcccggagagccgccgcccgttcgcgagccgcagccgccggcggcatgaggcgcgacccggcccccggcttctccatgctgctcttcggtgtgtcgctcgcctgctactcgcccagcctcaagtcagtgcaggaccaggcgtacaaggcacccgtggtggtggagggcaaggtacaggggctggtcccagccggcggctccagctccaacagcacccgagagccgcccgcctcgggtcgggtggcgttggtaaaggtgctggacaagtggccgctccggagcggggggctgcagcgcgagcaggtgatcagcgtgggctcctgtgtgccgctcgaaaggaaccagcgctacatctttttcctggagcccacggaacagcccttagtctttaagacggcctttgcccccctcgataccaacggcaaaaatctcaagaaagaggtgggcaagatcctgtgcactgactgcgccacccggcccaagttgaagaagatgaagagccagacgggacaggtgggtgagaagcaatcgctgaagtgtgaggcagcagccggtaatccccagccttcctaccgttggttcaaggatggcaaggagctcaaccgcagccgagacattcgcatcaaatatggcaacggcagaaagaactcacgactacagttcaacaaggtgaaggtggaggacgctggggagtatgtctgcgaggccgagaacatcctggggaaggacaccgtccggggccggctttacgtcaacagcgtgagcaccaccctgtcatcctggtcggggcacgcccggaagtgcaacgagacagccaagtcctattgcgtcaatggaggcgtctgctactacatcgagggcatcaaccagctctcctgcaagtgtcctgtgggatacaccggggacaggtgtcagcagttcgcaatggtcaacttctccaagcaccttggatttgaattaaaggaagccgaggagctgtaccagaagagggtcctgaccatcacgggcatctgcgtggctctgctggtcgtgggcatcgtctgtgtggtggcctactgcaagaccaaaaaacagcggaagcagatgcacaaccacctccggcagaacatgtgcccggcccatcagaaccggagcttggccaatgggcccagccacccccggctggacccagaggagatccagatggcagattatatttccaagaacgtgccagccacagaccatgtcatcaggagagaaactgagaccaccttctctgggagccactcctgttctccttctcaccactgctccacagccacacccacctccagccacagacacgagagccacacgtggagcctggaacgttctgagagcctgacttctgactcccagtcggggatcatgctatcatcagtgggtaccagcaaatgcaacagcccagcatgtgtggaggcccgggcaaggcgggcagcagcctacaacctggaggagcggcgcagggccaccgcgccaccctatcacgattccgtggactcccttcgcgactccccacacagcgagaggtacgtgtcggccctgaccacgcccgcgcgcctctcgcccgtggacttccactactcgctggccacgcaggtgccaactttcgagatcacgtcccccaactcggcgcacgccgtgtcgctgccgccggcggcgcccatcagttaccgcctggccgagcagcagccgttactgcggcacccggcgccccccggcccgggacccggacccgggcccgggcccgggcccggcgcagacatgcagcgcagctatgacagctactattaccccgcggcggggcccggaccgcggcgcgggacctgcgcgctcggcggcagcctgggcagcctgcctgccagccccttccgcatccccgaggacgacgagtacgagaccacgcaggagtgcgcgcccccgccgccgccgcggccgcgcgcgcgcggtgcgtcccgcaggacgtcggcggggccccggcgctggcgccgctcgcgcctcaacgggctggcggcgcagcgcgcacgggcggcgagggactcgctgtcgctgagcagcggctcgggcggcggctcagcctcggcgtcggacgacgacgcggacgacgcggacggggcgctggcggccgagagcacacctttcctgggcctgcgtggggcgcacgacgcgctgcgctcggactcgccgccactgtgcccggcggccgacagcaggacttactactcactggacagccacagcacgcgggccagcagcagacacagccgcgggccgcccccgcgggccaagcaggactcggcgccactctagggccccgccgcgcgcccctccgccccgcccgccccactatctttaaggagaccagagaccgcctactggagagaaaggaggaaaaaagaaataaaaatatttttattttctataaaaggaaaaaagtataacaaaatgttttattttcattttagcaaaaattgtcttataatactagctaacggcaaaggcgtttttatagggaaactatttatatgtaacatcctgatttacagcttcggaaaaaaaaaagaaacaacaaaaaaaaaagagagatgggccaattttttgactctttaatagaaacctattttgtggtgccttttgctgtatgctcatctggggctccgggggacaggtctgggttgtggggtgctgagagtgacagctgggagagaagaggtgcgggttctgttgggggcgagggtggggggcggtggggggttggccctaaggaagaactgaggacggaagtagctttgctcccaggcaagagctgaagttcccgacccctgggaggagagggccaggaccctaggcttggagctggagctggggtaacttccagggggagataaagacacagctacccgaatggggaagccctggctactcacagctgttaaaggagggggggcagagaaacgtttccccaagagcctgagcccagggaggtggcagctctgccaggggcccaatgttggcggctcctgtcccccacagcctccaggacgcccctccgtcctctgcagcaccttcgtttacaggtcgtcttttctattttacacctgcatgtcctttgcatttcagattctttagattggatgcatggtcacgctgggaccgagaagagccactcgacagtgtattccccttttagcaataaagtaacaccatttccttctcacaggctgcctcctagcccccaacccacctatgacatccactcgtctccagtcctgccctcccacccccaaaaactgggtccactgctaatttgtcaaaaaggtaattgtttaaaaaaaaaaaaaatcccaaacagaaacagatgggaatcctgtcctgaaatgtctgaacacctgactgttgacacttgaacatttttatattataaataaaatcagaaataactcctgttaaaaaaaaaaaaaaaaaa

SEQ ID NO: 62 - protein, 852 aa, Homo sapiens
MRQVCCSALPPPPLEKGRCSSYSDSSSSSSERSSSSSSSSSESGSSSRSSSNNSSISRPAAPPEPRPQQQPQPRSPAARRAAARSRAAAAGGMRRDPAPGFSMLLFGVSLACYSPSLKSVQDQAYKAPVVVEGKVQGLVPAGGSSSNSTREPPASGRVALVKVLDKWPLRSGGLQREQVISVGSCVPLERNQRYIFFLEPTEQPLVFKTAFAPLDTNGKNLKKEVGKILCTDCATRPKLKKMKSQTGQVGEKQSLKCEAAAGNPQPSYRWFKDGKELNRSRDIRIKYGNGRKNSRLQFNKVKVEDAGEYVCEAENILGKDTVRGRLYVNSVSTTLSSWSGHARKCNETAKSYCVNGGVCYYIEGINQLSCKCPVGYTGDRCQQFAMVNFSKHLGFELKEAEELYQKRVLTITGICVALLVVGIVCVVAYCKTKKQRKQMHNHLRQNMCPAHQNRSLANGPSHPRLDPEEIQMADYISKNVPATDHVIRRETETTFSGSHSCSPSHHCSTATPTSSHRHESHTWSLERSESLTSDSQSGIMLSSVGTSKCNSPACVEARARRAAAYNLEERRRATAPPYHDSVDSLRDSPHSERYVSALTTPARLSPVDFHYSLATQVPTFEITSPNSAHAVSLPPAAPISYRLAEQQPLLRHPAPPGPGPGPGPGPGPGADMQRSYDSYYYPAAGPGPRRGTCALGGSLGSLPASPFRIPEDDEYETTQECAPPPPPRPRARGASRRTSAGPRRWRRSRLNGLAAQRARAARDSLSLSSGSGGGSASASDDDADDADGALAAESTPFLGLRGAHDALRSDSPPLCPAADSRTYYSLDSHSTRASSRHSRGPPPRAKQDSAPL

SEQ ID NO: 63 - DNA, 3741 bp, Homo sapiens
  CDS (231)..(2585)
atcctcctccaggtcctggcgcacagggtgggagcgctgcgctgcgccgcgctgcgcatcgcggcccgcttgccgcctgccccctgccctagctgggccacctccccgggctgccggtggagggctaagaggcgctaacgttacgctgtttccggttttccagcgggctctgtttcccctcccaaggcggcggcggctgagcggcggagccccccaaatggcctggccagatgcggcaggtttgctgctcagcgctgccgccgccgccactggagaagggtcggtgcagcagctacagcgacagcagcagcagcagcagcgagaggagcagcagcagcagcagcagcagcagcgagagcggcagcagcagcaggagcagcagcaacaacagcagcatctctcgtcccgctgcgcccccagagccgcggccgcagcaacagccgcagccccgcagccccgcagcccggagagccgccgcccgttcgcgagccgcagccgccggcggcatgaggcgcgacccggcccccggcttctccatgctgctcttcggtgtgtcgctcgcctgctactcgcccagcctcaagtcagtgcaggaccaggcgtacaaggcacccgtggtggtggagggcaaggtacaggggctggtcccagccggcggctccagctccaacagcacccgagagccgcccgcctcgggtcgggtggcgttggtaaaggtgctggacaagtggccgctccggagcggggggctgcagcgcgagcaggtgatcagcgtgggctcctgtgtgccgctcgaaaggaaccagcgctacatctttttcctggagcccacggaacagcccttagtctttaagacggcctttgcccccctcgataccaacggcaaaaatctcaagaaagaggtgggcaagatcctgtgcactgactgcgccacccggcccaagttgaagaagatgaagagccagacgggacaggtgggtgagaagcaatcgctgaagtgtgaggcagcagccggtaatccccagccttcctaccgttggttcaaggatggcaaggagctcaaccgcagccgagacattcgcatcaaatatggcaacggcagaaagaactcacgactacagttcaacaaggtgaaggtggaggacgctggggagtatgtctgcgaggccgagaacatcctggggaaggacaccgtccggggccggctttacgtcaacagcgaagccgaggagctgtaccagaagagggtcctgaccatcacgggcatctgcgtggctctgctggtcgtgggcatcgtctgtgtggtggcctactgcaagaccaaaaaacagcggaagcagatgcacaaccacctccggcagaacatgtgcccggcccatcagaaccggagcttggccaatgggcccagccacccccggctggacccagaggagatccagatggcagattatatttccaagaacgtgccagccacagaccatgtcatcaggagagaaactgagaccaccttctctgggagccactcctgttctccttctcaccactgctccacagccacacccacctccagccacagacacgagagccacacgtggagcctggaacgttctgagagcctgacttctgactcccagtcggggatcatgctatcatcagtgggtaccagcaaatgcaacagcccagcatgtgtggaggcccgggcaaggcgggcagcagcctacaacctggaggagcggcgcagggccaccgcgccaccctatcacgattccgtggactcccttcgcgactccccacacagcgagaggtacgtgtcggccctgaccacgcccgcgcgcctctcgcccgtggacttccactactcgctggccacgcaggtgccaactttcgagatcacgtcccccaactcggcgcacgccgtgtcgctgccgccggcggcgcccatcagttaccgcctggccgagcagcagccgttactgcggcacccggcgccccccggcccgggacccggacccgggcccgggcccgggcccggcgcagacatgcagcgcagctatgacagctactattaccccgcggcggggcccggaccgcggcgcgggacctgcgcgctcggcggcagcctgggcagcctgcctgccagccccttccgcatccccgaggacgacgagtacgagaccacgcaggagtgcgcgcccccgccgccgccgcggccgcgcgcgcgcggtgcgtcccgcaggacgtcggcggggccccggcgctggcgccgctcgcgcctcaacgggctggcggcgcagcgcgcacgggcggcgagggactcgctgtcgctgagcagcggctcgggcggcggctcagcctcggcgtcggacgacgacgcggacgacgcggacggggcgctggcggccgagagcacacctttcctgggcctgcgtggggcgcacgacgcgctgcgctcggactcgccgccactgtgcccggcggccgacagcaggacttactactcactggacagccacagcacgcgggccagcagcagacacagccgcgggccgcccccgcgggccaagcaggactcggcgccactctagggccccgccgcgcgcccctccgccccgcccgccccactatctttaaggagaccagagaccgcctactggagagaaaggaggaaaaaagaaataaaaatatttttattttctataaaaggaaaaaagtataacaaaatgttttattttcattttagcaaaaattgtcttataatactagctaacggcaaaggcgtttttatagggaaactatttatatgtaacatcctgatttacagcttcggaaaaaaaaaagaaacaacaaaaaaaaaagagagatgggccaattttttgactctttaatagaaacctattttgtggtgccttttgctgtatgctcatctggggctccgggggacaggtctgggttgtggggtgctgagagtgacagctgggagagaagaggtgcgggttctgttgggggcgagggtggggggcggtggggggttggccctaaggaagaactgaggacggaagtagctttgctcccaggcaagagctgaagttcccgacccctgggaggagagggccaggaccctaggcttggagctggagctggggtaacttccagggggagataaagacacagctacccgaatggggaagccctggctactcacagctgttaaaggagggggggcagagaaacgtttccccaagagcctgagcccagggaggtggcagctctgccaggggcccaatgttggcggctcctgtcccccacagcctccaggacgcccctccgtcctctgcagcaccttcgtttacaggtcgtcttttctattttacacctgcatgtcctttgcatttcagattctttagattggatgcatggtcacgctgggaccgagaagagccactcgacagtgtattccccttttagcaataaagtaacaccatttccttctcacaggctgcctcctagcccccaacccacctatgacatccactcgtctccagtcctgccctcccacccccaaaaactgggtccactgctaatttgtcaaaaaggtaattgtttaaaaaaaaaaaaaatcccaaacagaaacagatgggaatcctgtcctgaaatgtctgaacacctgactgttgacacttgaacatttttatattataaataaaatcagaaataactcctgttaaaaaaaaaaaaaaaaaa

SEQ ID NO: 64 - protein, 784 aa, Homo sapiens
MRQVCCSALPPPPLEKGRCSSYSDSSSSSSERSSSSSSSSSESGSSSRSSSNNSSISRPAAPPEPRPQQQPQPRSPAARRAAARSRAAAAGGMRRDPAPGFSMLLFGVSLACYSPSLKSVQDQAYKAPVVVEGKVQGLVPAGGSSSNSTREPPASGRVALVKVLDKWPLRSGGLQREQVISVGSCVPLERNQRYIFFLEPTEQPLVFKTAFAPLDTNGKNLKKEVGKILCTDCATRPKLKKMKSQTGQVGEKQSLKCEAAAGNPQPSYRWFKDGKELNRSRDIRIKYGNGRKNSRLQFNKVKVEDAGEYVCEAENILGKDTVRGRLYVNSEAEELYQKRVLTITGICVALLVVGIVCVVAYCKTKKQRKQMHNHLRQNMCPAHQNRSLANGPSHPRLDPEEIQMADYISKNVPATDHVIRRETETTFSGSHSCSPSHHCSTATPTSSHRHESHTWSLERSESLTSDSQSGIMLSSVGTSKCNSPACVEARARRAAAYNLEERRRATAPPYHDSVDSLRDSPHSERYVSALTTPARLSPVDFHYSLATQVPTFEITSPNSAHAVSLPPAAPISYRLAEQQPLLRHPAPPGPGPGPGPGPGPGADMQRSYDSYYYPAAGPGPRRGTCALGGSLGSLPASPFRIPEDDEYETTQECAPPPPPRPRARGASRRTSAGPRRWRRSRLNGLAAQRARAARDSLSLSSGSGGGSASASDDDADDADGALAAESTPFLGLRGAHDALRSDSPPLCPAADSRTYYSLDSHSTRASSRHSRGPPPRAKQDSAPL

SEQ ID NO: 65 - DNA, 24 bp, Artificial Sequence
  ATG3 sense primer
cactggaagtggctgagtacctga

SEQ ID NO: 66 - DNA, 20 bp, Artificial Sequence
  EPHB1 antisense primer
gccgcagcccatcaatcctt

SEQ ID NO: 67 - DNA, 24 bp, Artificial Sequence
  TNIK sense primer
ggtcagtggaaacaggacatttgg

SEQ ID NO: 68 - DNA, 22 bp, Artificial Sequence
  RNF123 antisense primer
acgccttgccataattcgttgt

SEQ ID NO: 69 - DNA, 25 bp, Artificial Sequence
  SLC12A2 sense primer
ggtcaagctggaataggtctatcag

SEQ ID NO: 70 - DNA, 20 bp, Artificial Sequence
  NRG2 antisense primer
tgcctcacacttcagcgatt

SEQ ID NO: 71 - DNA, 150 bp, Homo sapiens
cactggaagtggctgagtacctgaccccggtcctcaaggaatcaaagtttaaggaaacaggtgtaattaccccagaagaggaacacaatgagttcaactcctccatggccaggagtcagaccaacacagcaaggattgatgggctgcggc

SEQ ID NO: 72 - DNA, 318 bp, Homo sapiens
ggtcagtggaaacaggacatttggatggagtatttatgcataagcgagctcaaaggttaaagtttctatgtgaaagaaatgataaggtgattggacacagcaactttggcaccatccgctctaccacatgcgtgtacaaagggaaatggctctacgaggtcctcatctcctcccaggggctcatgcagatcggctggtgcaccatcagctgccgcttcaaccaggaggagggggttggagatacacacaactcctatgcctatgatggcaaccgcgtgcgcaagtggaatgtgaccacaacgaattatggcaaggcgt

SEQ ID NO: 73 - DNA, 189 bp, Homo sapiens
ggtcaagctggaataggtctatcagtccttgtaataatgatggccactgttgtgacaactatcacaggattgtctacttcagcaatagcaactaatggatttgtaagaggagccacccggcccaagttgaagaagatgaagagccagacgggacaggtgggtgagaagcaatcgctgaagtgtgaggca
